United States Patent Application Publication US 2023/0348571 A1 - sequence listing, part 2

SEQ ID NO: 24871 - protein, 9 aa, Artificial Sequence
  Synthetic construct
QQYYSTPYT

SEQ ID NO: 24872 - protein, 12 aa, Artificial Sequence
  Synthetic construct
AAWDDSLSGRGV

SEQ ID NO: 24873 - protein, 12 aa, Artificial Sequence
  Synthetic construct
NSRDSSGNHLRV

SEQ ID NO: 24874 - protein, 9 aa, Artificial Sequence
  Synthetic construct
QAWDSSTEV

SEQ ID NO: 24875 - protein, 10 aa, Artificial Sequence
  Synthetic construct
QQSYSSPQLT

SEQ ID NO: 24876 - protein, 9 aa, Artificial Sequence
  Synthetic construct
KQYNSYPYT

SEQ ID NO: 24877 - protein, 8 aa, Artificial Sequence
  Synthetic construct
CSYAGSTV

SEQ ID NO: 24878 - protein, 9 aa, Artificial Sequence
  Synthetic construct
QQLNTYPRT

SEQ ID NO: 24879 - protein, 11 aa, Artificial Sequence
  Synthetic construct
GTWDSSLSAEV

SEQ ID NO: 24880 - protein, 12 aa, Artificial Sequence
  Synthetic construct
TSYRSSSTLEVL

SEQ ID NO: 24881 - protein, 10 aa, Artificial Sequence
  Synthetic construct
QQFDSVPPYT

SEQ ID NO: 24882 - protein, 8 aa, Artificial Sequence
  Synthetic construct
QQRMSWLT

SEQ ID NO: 24883 - protein, 9 aa, Artificial Sequence
  Synthetic construct
HKYNGAPKT

SEQ ID NO: 24884 - protein, 9 aa, Artificial Sequence
  Synthetic construct
QKYNSAPLT

SEQ ID NO: 24885 - protein, 9 aa, Artificial Sequence
  Synthetic construct
QQYNSYPYT

SEQ ID NO: 24886 - protein, 9 aa, Artificial Sequence
  Synthetic construct
QQYGSSPET

SEQ ID NO: 24887 - protein, 9 aa, Artificial Sequence
  Synthetic construct
QQYYSYPRT

SEQ ID NO: 24888 - protein, 10 aa, Artificial Sequence
  Synthetic construct
VLYMGSGMVV

SEQ ID NO: 24889 - protein, 9 aa, Artificial Sequence
  Synthetic construct
MQGIHLPRT

SEQ ID NO: 24890 - protein, 12 aa, Artificial Sequence
  Synthetic construct
SSYTSSSTLRYV

SEQ ID NO: 24891 - protein, 10 aa, Artificial Sequence
  Synthetic construct
QKYNSAPRYT

SEQ ID NO: 24892 - protein, 11 aa, Artificial Sequence
  Synthetic construct
ATWDNSLKTVV

SEQ ID NO: 24893 - protein, 12 aa, Artificial Sequence
  Synthetic construct
AAWDDSLSGNWV

SEQ ID NO: 24894 - protein, 9 aa, Artificial Sequence
  Synthetic construct
QQYNNWPPA

SEQ ID NO: 24895 - protein, 11 aa, Artificial Sequence
  Synthetic construct
QQRSNWPPGLT

SEQ ID NO: 24896 - protein, 10 aa, Artificial Sequence
  Synthetic construct
QQYYRTPPHT

SEQ ID NO: 24897 - protein, 10 aa, Artificial Sequence
  Synthetic construct
CSYAGSSTFL

SEQ ID NO: 24898 - protein, 9 aa, Artificial Sequence
  Synthetic construct
QAWITSEVV

SEQ ID NO: 24899 - protein, 8 aa, Artificial Sequence
  Synthetic construct
QQRSNWLT

SEQ ID NO: 24900 - protein, 11 aa, Artificial Sequence
  Synthetic construct
AAWDDSLNVVV

SEQ ID NO: 24901 - protein, 10 aa, Artificial Sequence
  Synthetic construct
MQATHWPPKT

SEQ ID NO: 24902 - protein, 9 aa, Artificial Sequence
  Synthetic construct
SQDSRFPLT

SEQ ID NO: 24903 - protein, 11 aa, Artificial Sequence
  Synthetic construct
QSYDSSLSAVV

SEQ ID NO: 24904 - protein, 9 aa, Artificial Sequence
  Synthetic construct
QRSFSTPWT

SEQ ID NO: 24905 - protein, 8 aa, Artificial Sequence
  Synthetic construct
QQSYSTRT

SEQ ID NO: 24906 - protein, 8 aa, Artificial Sequence
  Synthetic construct
QQYYSTPT

SEQ ID NO: 24907 - protein, 11 aa, Artificial Sequence
  Synthetic construct
AAWDDSLSGLV

SEQ ID NO: 24908 - protein, 9 aa, Artificial Sequence
  Synthetic construct
QQYYSYPYT

SEQ ID NO: 24909 - protein, 11 aa, Artificial Sequence
  Synthetic construct
QSRDTNLGGAV

SEQ ID NO: 24910 - protein, 10 aa, Artificial Sequence
  Synthetic construct
TSYTSSSTLQ

SEQ ID NO: 24911 - protein, 10 aa, Artificial Sequence
  Synthetic construct
SSYTSSSTRV

SEQ ID NO: 24912 - protein, 9 aa, Artificial Sequence
  Synthetic construct
QQYDSTPWT

SEQ ID NO: 24913 - protein, 9 aa, Artificial Sequence
  Synthetic construct
QQYYSTPLT

SEQ ID NO: 24914 - protein, 9 aa, Artificial Sequence
  Synthetic construct
QTWGTGIRV

SEQ ID NO: 24915 - protein, 9 aa, Artificial Sequence
  Synthetic construct
QQYYSYPRT

SEQ ID NO: 24916 - protein, 11 aa, Artificial Sequence
  Synthetic construct
GTWDSSLSAGV

SEQ ID NO: 24917 - protein, 11 aa, Artificial Sequence
  Synthetic construct
QQSFFTPRELT

SEQ ID NO: 24918 - protein, 9 aa, Artificial Sequence
  Synthetic construct
MQGIHLLYT

SEQ ID NO: 24919 - protein, 11 aa, Artificial Sequence
  Synthetic construct
QHYGSSPPEFT

SEQ ID NO: 24920 - protein, 9 aa, Artificial Sequence
  Synthetic construct
QQLNSYPPT

SEQ ID NO: 24921 - protein, 10 aa, Artificial Sequence
  Synthetic construct
QHYGNSPPIT

SEQ ID NO: 24922 - protein, 9 aa, Artificial Sequence
  Synthetic construct
QQYNNWPYT

SEQ ID NO: 24923 - protein, 11 aa, Artificial Sequence
  Synthetic construct
AAWDDRLNGVV

SEQ ID NO: 24924 - protein, 9 aa, Artificial Sequence
  Synthetic construct
VQGIHLPWT

SEQ ID NO: 24925 - protein, 11 aa, Artificial Sequence
  Synthetic construct
QHYGSSPPEFT

SEQ ID NO: 24926 - protein, 10 aa, Artificial Sequence
  Synthetic construct
CSYARGSIFV

SEQ ID NO: 24927 - protein, 10 aa, Artificial Sequence
  Synthetic construct
QQFGSSPPLT

SEQ ID NO: 24928 - protein, 9 aa, Artificial Sequence
  Synthetic construct
LQTSHWPRA

SEQ ID NO: 24929 - protein, 9 aa, Artificial Sequence
  Synthetic construct
TQAKQFPFT

SEQ ID NO: 24930 - protein, 9 aa, Artificial Sequence
  Synthetic construct
QQTFTSSRT

SEQ ID NO: 24931 - protein, 10 aa, Artificial Sequence
  Synthetic construct
QQYNSYSELT

SEQ ID NO: 24932 - protein, 11 aa, Artificial Sequence
  Synthetic construct
QQYHSYSPTNT

SEQ ID NO: 24933 - protein, 10 aa, Artificial Sequence
  Synthetic construct
MQGTHWPRRT

SEQ ID NO: 24934 - protein, 9 aa, Artificial Sequence
  Synthetic construct
QKYNSAPLT

SEQ ID NO: 24935 - protein, 9 aa, Artificial Sequence
  Synthetic construct
MIWHSGTWE

SEQ ID NO: 24936 - protein, 10 aa, Artificial Sequence
  Synthetic construct
QQYHSSSGYT

SEQ ID NO: 24937 - protein, 11 aa, Artificial Sequence
  Synthetic construct
ATWDDNLGGWV

SEQ ID NO: 24938 - protein, 10 aa, Artificial Sequence
  Synthetic construct
QQYGSSPPYT

SEQ ID NO: 24939 - protein, 9 aa, Artificial Sequence
  Synthetic construct
QQYNNWLRT

SEQ ID NO: 24940 - protein, 9 aa, Artificial Sequence
  Synthetic construct
QHYNSYPVT

SEQ ID NO: 24941 - protein, 9 aa, Artificial Sequence
  Synthetic construct
QQYNSYSGT

SEQ ID NO: 24942 - protein, 9 aa, Artificial Sequence
  Synthetic construct
QQYYSYPLT

SEQ ID NO: 24943 - protein, 9 aa, Artificial Sequence
  Synthetic construct
QQANSFPQT

SEQ ID NO: 24944 - protein, 11 aa, Artificial Sequence
  Synthetic construct
CSYAGSYTFRV

SEQ ID NO: 24945 - protein, 9 aa, Artificial Sequence
  Synthetic construct
QQYYSTPYT

SEQ ID NO: 24946 - protein, 9 aa, Artificial Sequence
  Synthetic construct
QTWGTGIQV

SEQ ID NO: 24947 - protein, 9 aa, Artificial Sequence
  Synthetic construct
QQSYSTPVT

SEQ ID NO: 24948 - protein, 9 aa, Artificial Sequence
  Synthetic construct
QQYYTTPYT

SEQ ID NO: 24949 - protein, 9 aa, Artificial Sequence
  Synthetic construct
QQYGGSPPT

SEQ ID NO: 24950 - protein, 9 aa, Artificial Sequence
  Synthetic construct
QQYNSYSRT

SEQ ID NO: 24951 - protein, 9 aa, Artificial Sequence
  Synthetic construct
MQSLQTPLT

SEQ ID NO: 24952 - protein, 9 aa, Artificial Sequence
  Synthetic construct
QQGNNFQWT

SEQ ID NO: 24953 - protein, 9 aa, Artificial Sequence
  Synthetic construct
QQYYSYPWT

SEQ ID NO: 24954 - protein, 9 aa, Artificial Sequence
  Synthetic construct
QQYNGYPWT

SEQ ID NO: 24955 - protein, 11 aa, Artificial Sequence
  Synthetic construct
QQYNNWPLSIT

SEQ ID NO: 24956 - protein, 9 aa, Artificial Sequence
  Synthetic construct
QQYDKSPYT

SEQ ID NO: 24957 - protein, 9 aa, Artificial Sequence
  Synthetic construct
QQYYSYPFT

SEQ ID NO: 24958 - protein, 9 aa, Artificial Sequence
  Synthetic construct
QQYNSYSWT

SEQ ID NO: 24959 - protein, 9 aa, Artificial Sequence
  Synthetic construct
QQYNRRPLT

SEQ ID NO: 24960 - protein, 11 aa, Artificial Sequence
  Synthetic construct
QSADSSGTYYV

SEQ ID NO: 24961 - protein, 9 aa, Artificial Sequence
  Synthetic construct
MQGTHWPIT

SEQ ID NO: 24962 - protein, 10 aa, Artificial Sequence
  Synthetic construct
CSYAGSGTVL

SEQ ID NO: 24963 - protein, 9 aa, Artificial Sequence
  Synthetic construct
QQYYNTPFT

SEQ ID NO: 24964 - protein, 10 aa, Artificial Sequence
  Synthetic construct
SSYTSSSTWV

SEQ ID NO: 24965 - protein, 12 aa, Artificial Sequence
  Synthetic construct
GAWDGSLSAGWV

SEQ ID NO: 24966 - protein, 9 aa, Artificial Sequence
  Synthetic construct
QQLNSYPPT

SEQ ID NO: 24967 - protein, 8 aa, Artificial Sequence
  Synthetic construct
LQGINPWT

SEQ ID NO: 24968 - protein, 9 aa, Artificial Sequence
  Synthetic construct
QQLNSYPFT

SEQ ID NO: 24969 - protein, 9 aa, Artificial Sequence
  Synthetic construct
LQHNNYPWT

SEQ ID NO: 24970 - protein, 9 aa, Artificial Sequence
  Synthetic construct
QQRSNWPRT

SEQ ID NO: 24971 - protein, 9 aa, Artificial Sequence
  Synthetic construct
QQLNGYPPT

SEQ ID NO: 24972 - protein, 11 aa, Artificial Sequence
  Synthetic construct
SSYTSSSTLVV

SEQ ID NO: 24973 - protein, 11 aa, Artificial Sequence
  Synthetic construct
QRYNNWPPEGT

SEQ ID NO: 24974 - protein, 9 aa, Artificial Sequence
  Synthetic construct
HQYGGSPWT

SEQ ID NO: 24975 - protein, 9 aa, Artificial Sequence
  Synthetic construct
QQLNTYPRT

SEQ ID NO: 24976 - protein, 11 aa, Artificial Sequence
  Synthetic construct
AAWDDSLSGVV

SEQ ID NO: 24977 - protein, 11 aa, Artificial Sequence
  Synthetic construct
QSADSSGTYGV

SEQ ID NO: 24978 - protein, 10 aa, Artificial Sequence
  Synthetic construct
CSLTNSGAWL

SEQ ID NO: 24979 - protein, 9 aa, Artificial Sequence
  Synthetic construct
QQYGSSPRT

SEQ ID NO: 24980 - protein, 10 aa, Artificial Sequence
  Synthetic construct
LLSYTDARPA

SEQ ID NO: 24981 - protein, 9 aa, Artificial Sequence
  Synthetic construct
MQGLELPHT

SEQ ID NO: 24982 - protein, 9 aa, Artificial Sequence
  Synthetic construct
QQYYNTPRT

SEQ ID NO: 24983 - protein, 11 aa, Artificial Sequence
  Synthetic construct
APWDDSLSGPV

SEQ ID NO: 24984 - protein, 11 aa, Artificial Sequence
  Synthetic construct
QVWDSISDHVI

SEQ ID NO: 24985 - protein, 9 aa, Artificial Sequence
  Synthetic construct
QKFNSAPWT

SEQ ID NO: 24986 - protein, 10 aa, Artificial Sequence
  Synthetic construct
QQYGSSPRLT

SEQ ID NO: 24987 - protein, 9 aa, Artificial Sequence
  Synthetic construct
QQRSNWPQT

SEQ ID NO: 24988 - protein, 9 aa, Artificial Sequence
  Synthetic construct
MQGTHWPLT

SEQ ID NO: 24989 - protein, 11 aa, Artificial Sequence
  Synthetic construct
QSPDSSGTYEV

SEQ ID NO: 24990 - protein, 9 aa, Artificial Sequence
  Synthetic construct
QQYNIWPNT

SEQ ID NO: 24991 - protein, 10 aa, Artificial Sequence
  Synthetic construct
QQFENVPPVT

SEQ ID NO: 24992 - protein, 9 aa, Artificial Sequence
  Synthetic construct
LQDDDYPRT

SEQ ID NO: 24993 - protein, 9 aa, Artificial Sequence
  Synthetic construct
QQYGTSPRT

SEQ ID NO: 24994 - protein, 9 aa, Artificial Sequence
  Synthetic construct
QQYNSFPYT

SEQ ID NO: 24995 - protein, 11 aa, Artificial Sequence
  Synthetic construct
SSYTSTGAFVL

SEQ ID NO: 24996 - protein, 9 aa, Artificial Sequence
  Synthetic construct
QSWGASGAV

SEQ ID NO: 24997 - protein, 9 aa, Artificial Sequence
  Synthetic construct
QQSYSTPIT

SEQ ID NO: 24998 - protein, 9 aa, Artificial Sequence
  Synthetic construct
QQYYITPYT

SEQ ID NO: 24999 - protein, 11 aa, Artificial Sequence
  Synthetic construct
GTWDNSLSAGV

SEQ ID NO: 25000 - protein, 9 aa, Artificial Sequence
  Synthetic construct
QQVNTYPRT

SEQ ID NO: 25001 - protein, 9 aa, Artificial Sequence
  Synthetic construct
KQANSFPIT

SEQ ID NO: 25002 - protein, 10 aa, Artificial Sequence
  Synthetic construct
SSYTSSSTWV

SEQ ID NO: 25003 - protein, 9 aa, Artificial Sequence
  Synthetic construct
QQYYSYPQT

SEQ ID NO: 25004 - protein, 9 aa, Artificial Sequence
  Synthetic construct
QQYGTSPRT

SEQ ID NO: 25005 - protein, 9 aa, Artificial Sequence
  Synthetic construct
QQYGSSPHT

SEQ ID NO: 25006 - protein, 9 aa, Artificial Sequence
  Synthetic construct
MQGTHWPRT

SEQ ID NO: 25007 - protein, 9 aa, Artificial Sequence
  Synthetic construct
QSWGASGAV

SEQ ID NO: 25008 - protein, 9 aa, Artificial Sequence
  Synthetic construct
QQLNIYPRT

SEQ ID NO: 25009 - protein, 8 aa, Artificial Sequence
  Synthetic construct
QQYRVSYT

SEQ ID NO: 25010 - protein, 8 aa, Artificial Sequence
  Synthetic construct
QQRSNWLT

SEQ ID NO: 25011 - protein, 9 aa, Artificial Sequence
  Synthetic construct
LQLNSYPLT

SEQ ID NO: 25012 - protein, 9 aa, Artificial Sequence
  Synthetic construct
QQLNSYPPT

SEQ ID NO: 25013 - protein, 9 aa, Artificial Sequence
  Synthetic construct
QTWDSSTVV

SEQ ID NO: 25014 - protein, 9 aa, Artificial Sequence
  Synthetic construct
QQLNTYPRT

SEQ ID NO: 25015 - protein, 10 aa, Artificial Sequence
  Synthetic construct
CSYAGSSLYV

SEQ ID NO: 25016 - protein, 9 aa, Artificial Sequence
  Synthetic construct
MIWYNSASV

SEQ ID NO: 25017 - protein, 10 aa, Artificial Sequence
  Synthetic construct
SSYTSSSTVV

SEQ ID NO: 25018 - protein, 9 aa, Artificial Sequence
  Synthetic construct
QQYYSYPPT

SEQ ID NO: 25019 - protein, 12 aa, Artificial Sequence
  Synthetic construct
CSYAGNSAFPYV

SEQ ID NO: 25020 - protein, 9 aa, Artificial Sequence
  Synthetic construct
QQYNSYPWT

SEQ ID NO: 25021 - protein, 9 aa, Artificial Sequence
  Synthetic construct
QQSYSTPYT

SEQ ID NO: 25022 - protein, 9 aa, Artificial Sequence
  Synthetic construct
QTWGSGIVV

SEQ ID NO: 25023 - protein, 8 aa, Artificial Sequence
  Synthetic construct
QQYDGSPT

SEQ ID NO: 25024 - protein, 10 aa, Artificial Sequence
  Synthetic construct
ATWDAGLRVV

SEQ ID NO: 25025 - protein, 10 aa, Artificial Sequence
  Synthetic construct
CSHAGRYIWV

SEQ ID NO: 25026 - protein, 9 aa, Artificial Sequence
  Synthetic construct
QRSFSTPWT

SEQ ID NO: 25027 - protein, 9 aa, Artificial Sequence
  Synthetic construct
QQYNSYSRT

SEQ ID NO: 25028 - protein, 8 aa, Artificial Sequence
  Synthetic construct
QQSYTTRT

SEQ ID NO: 25029 - protein, 9 aa, Artificial Sequence
  Synthetic construct
QQYNNWPLT

SEQ ID NO: 25030 - protein, 10 aa, Artificial Sequence
  Synthetic construct
QQYNNYFKWT

SEQ ID NO: 25031 - protein, 9 aa, Artificial Sequence
  Synthetic construct
QQYNNWPYT

SEQ ID NO: 25032 - protein, 9 aa, Artificial Sequence
  Synthetic construct
MQGTHWPLT

SEQ ID NO: 25033 - protein, 9 aa, Artificial Sequence
  Synthetic construct
QQSYSSPLT

SEQ ID NO: 25034 - protein, 9 aa, Artificial Sequence
  Synthetic construct
QQYYSTPRT

SEQ ID NO: 25035 - protein, 10 aa, Artificial Sequence
  Synthetic construct
QQYKDWPPWT

SEQ ID NO: 25036 - protein, 10 aa, Artificial Sequence
  Synthetic construct
AAWDDSLSAL

SEQ ID NO: 25037 - protein, 11 aa, Artificial Sequence
  Synthetic construct
QVWDSDSGHPI

SEQ ID NO: 25038 - protein, 10 aa, Artificial Sequence
  Synthetic construct
CSYAGSSTYV

SEQ ID NO: 25039 - protein, 9 aa, Artificial Sequence
  Synthetic construct
QTWATGVVV

SEQ ID NO: 25040 - protein, 9 aa, Artificial Sequence
  Synthetic construct
QQSYSTPVT

SEQ ID NO: 25041 - protein, 10 aa, Artificial Sequence
  Synthetic construct
QQYNNWPPLT

SEQ ID NO: 25042 - protein, 12 aa, Artificial Sequence
  Synthetic construct
ASYTGTSTLEVV

SEQ ID NO: 25043 - protein, 9 aa, Artificial Sequence
  Synthetic construct
QQFGRSPRT

SEQ ID NO: 25044 - protein, 9 aa, Artificial Sequence
  Synthetic construct
LQHNSYPYT

SEQ ID NO: 25045 - protein, 13 aa, Artificial Sequence
  Synthetic construct
AAWDDSLSGPDVV

SEQ ID NO: 25046 - protein, 6 aa, Artificial Sequence
  Synthetic construct
MQGTHR

SEQ ID NO: 25047 - protein, 10 aa, Artificial Sequence
  Synthetic construct
LLYYGGAQGV

SEQ ID NO: 25048 - protein, 9 aa, Artificial Sequence
  Synthetic construct
QQYGSSPLT

SEQ ID NO: 25049 - protein, 9 aa, Artificial Sequence
  Synthetic construct
QQSYSTPYT

SEQ ID NO: 25050 - protein, 10 aa, Artificial Sequence
  Synthetic construct
SSYTSSSTVV

SEQ ID NO: 25051 - protein, 9 aa, Artificial Sequence
  Synthetic construct
QRSFSTPWT

SEQ ID NO: 25052 - protein, 9 aa, Artificial Sequence
  Synthetic construct
QQANSFPLT

SEQ ID NO: 25053 - protein, 9 aa, Artificial Sequence
  Synthetic construct
QQFDTSPLT

SEQ ID NO: 25054 - protein, 9 aa, Artificial Sequence
  Synthetic construct
QQVKSFSLT

SEQ ID NO: 25055 - protein, 9 aa, Artificial Sequence
  Synthetic construct
QQFNNWPRT

SEQ ID NO: 25056 - protein, 11 aa, Artificial Sequence
  Synthetic construct
QSHDRSLSGTV

SEQ ID NO: 25057 - protein, 11 aa, Artificial Sequence
  Synthetic construct
SSYAGSNNSDV

SEQ ID NO: 25058 - protein, 9 aa, Artificial Sequence
  Synthetic construct
MQALQTPLT

SEQ ID NO: 25059 - protein, 9 aa, Artificial Sequence
  Synthetic construct
QQYGTSSWT

SEQ ID NO: 25060 - protein, 10 aa, Artificial Sequence
  Synthetic construct
CSYARGSIFV

SEQ ID NO: 25061 - protein, 9 aa, Artificial Sequence
  Synthetic construct
QKYNSAPYT

SEQ ID NO: 25062 - protein, 9 aa, Artificial Sequence
  Synthetic construct
QQANSFPRT

SEQ ID NO: 25063 - protein, 11 aa, Artificial Sequence
  Synthetic construct
GTWDSSLKAMV

SEQ ID NO: 25064 - protein, 9 aa, Artificial Sequence
  Synthetic construct
QQYYSTPWT

SEQ ID NO: 25065 - protein, 9 aa, Artificial Sequence
  Synthetic construct
QQYNNWPEA

SEQ ID NO: 25066 - protein, 9 aa, Artificial Sequence
  Synthetic construct
MIWHSSAWV

SEQ ID NO: 25067 - protein, 9 aa, Artificial Sequence
  Synthetic construct
QRRSNWPFT

SEQ ID NO: 25068 - protein, 11 aa, Artificial Sequence
  Synthetic construct
QVWDSSSDHVV

SEQ ID NO: 25069 - protein, 11 aa, Artificial Sequence
  Synthetic construct
AAWDDSLSGWV

SEQ ID NO: 25070 - protein, 9 aa, Artificial Sequence
  Synthetic construct
QQYYSYPLT

SEQ ID NO: 25071 - protein, 9 aa, Artificial Sequence
  Synthetic construct
QQYGTSPYT

SEQ ID NO: 25072 - protein, 9 aa, Artificial Sequence
  Synthetic construct
QRSFSTPWT

SEQ ID NO: 25073 - protein, 10 aa, Artificial Sequence
  Synthetic construct
LLSYSAVRRV

SEQ ID NO: 25074 - protein, 9 aa, Artificial Sequence
  Synthetic construct
QQSYLTPPT

SEQ ID NO: 25075 - protein, 9 aa, Artificial Sequence
  Synthetic construct
QQRSRWPGT

SEQ ID NO: 25076 - protein, 12 aa, Artificial Sequence
  Synthetic construct
LSYITRTTLEVV

SEQ ID NO: 25077 - protein, 8 aa, Artificial Sequence
  Synthetic construct
QQYNNWPS

SEQ ID NO: 25078 - protein, 12 aa, Artificial Sequence
  Synthetic construct
CSYAGSSTLHVV

SEQ ID NO: 25079 - protein, 12 aa, Artificial Sequence
  Synthetic construct
QLYDNLPPGMYT

SEQ ID NO: 25080 - protein, 9 aa, Artificial Sequence
  Synthetic construct
QQRSHWPLT

SEQ ID NO: 25081 - protein, 10 aa, Artificial Sequence
  Synthetic construct
QQYYSTPRRT

SEQ ID NO: 25082 - protein, 9 aa, Artificial Sequence
  Synthetic construct
QQYNNWLYT

SEQ ID NO: 25083 - protein, 9 aa, Artificial Sequence
  Synthetic construct
QQYYSTPIT

SEQ ID NO: 25084 - protein, 9 aa, Artificial Sequence
  Synthetic construct
QSYENNIVV

SEQ ID NO: 25085 - protein, 9 aa, Artificial Sequence
  Synthetic construct
QQLGGSPYT

SEQ ID NO: 25086 - protein, 9 aa, Artificial Sequence
  Synthetic construct
QQYYSFPLT

SEQ ID NO: 25087 - protein, 11 aa, Artificial Sequence
  Synthetic construct
NSRDSSGNHWV

SEQ ID NO: 25088 - protein, 11 aa, Artificial Sequence
  Synthetic construct
AAWDDSLNGWV

SEQ ID NO: 25089 - protein, 9 aa, Artificial Sequence
  Synthetic construct
QQLNSYPFT

SEQ ID NO: 25090 - protein, 9 aa, Artificial Sequence
  Synthetic construct
QQFNDWPIT

SEQ ID NO: 25091 - protein, 10 aa, Artificial Sequence
  Synthetic construct
QQYYITPPYT

SEQ ID NO: 25092 - protein, 9 aa, Artificial Sequence
  Synthetic construct
QQANSFPIT

SEQ ID NO: 25093 - protein, 9 aa, Artificial Sequence
  Synthetic construct
TQATQLPYT

SEQ ID NO: 25094 - protein, 9 aa, Artificial Sequence
  Synthetic construct
MQALQTPLT

SEQ ID NO: 25095 - protein, 9 aa, Artificial Sequence
  Synthetic construct
QQGNSFPVT

SEQ ID NO: 25096 - protein, 9 aa, Artificial Sequence
  Synthetic construct
QQYYNTPRT

SEQ ID NO: 25097 - protein, 9 aa, Artificial Sequence
  Synthetic construct
QQYYNTPRT

SEQ ID NO: 25098 - protein, 9 aa, Artificial Sequence
  Synthetic construct
QQYNSYPRT

SEQ ID NO: 25099 - protein, 10 aa, Artificial Sequence
  Synthetic construct
SSYSRVTTCV

SEQ ID NO: 25100 - protein, 9 aa, Artificial Sequence
  Synthetic construct
QQYGNSSFT

SEQ ID NO: 25101 - protein, 9 aa, Artificial Sequence
  Synthetic construct
QQSYNSPHT

SEQ ID NO: 25102 - protein, 9 aa, Artificial Sequence
  Synthetic construct
QRSFSTPWT

SEQ ID NO: 25103 - protein, 10 aa, Artificial Sequence
  Synthetic construct
QQYNNWPPYT

SEQ ID NO: 25104 - protein, 9 aa, Artificial Sequence
  Synthetic construct
QQTYNIPRT

SEQ ID NO: 25105 - protein, 9 aa, Artificial Sequence
  Synthetic construct
QAWDSGTAL

SEQ ID NO: 25106 - protein, 12 aa, Artificial Sequence
  Synthetic construct
AAWDDSLRGNYV

SEQ ID NO: 25107 - protein, 11 aa, Artificial Sequence
  Synthetic construct
SSYAGSNNFVV

SEQ ID NO: 25108 - protein, 12 aa, Artificial Sequence
  Synthetic construct
CSYAGSSTPDYV

SEQ ID NO: 25109 - protein, 11 aa, Artificial Sequence
  Synthetic construct
QQRSNWPPSLT

SEQ ID NO: 25110 - protein, 9 aa, Artificial Sequence
  Synthetic construct
MQSTHLRYT

SEQ ID NO: 25111 - protein, 10 aa, Artificial Sequence
  Synthetic construct
SSYTSSSTYV

SEQ ID NO: 25112 - protein, 10 aa, Artificial Sequence
  Synthetic construct
YSAADDRLAV

SEQ ID NO: 25113 - protein, 9 aa, Artificial Sequence
  Synthetic construct
QRSFSTPWT

SEQ ID NO: 25114 - protein, 10 aa, Artificial Sequence
  Synthetic construct
QQRSNWPLFT

SEQ ID NO: 25115 - protein, 9 aa, Artificial Sequence
  Synthetic construct
QQYNNWPRT

SEQ ID NO: 25116 - protein, 8 aa, Artificial Sequence
  Synthetic construct
MQALQTFT

SEQ ID NO: 25117 - protein, 8 aa, Artificial Sequence
  Synthetic construct
QQSYSTPT

SEQ ID NO: 25118 - protein, 11 aa, Artificial Sequence
  Synthetic construct
QVWDSRNDHVI

SEQ ID NO: 25119 - protein, 9 aa, Artificial Sequence
  Synthetic construct
QQYYSFPYT

SEQ ID NO: 25120 - protein, 9 aa, Artificial Sequence
  Synthetic construct
QQYNSYSRT

SEQ ID NO: 25121 - protein, 9 aa, Artificial Sequence
  Synthetic construct
QQADTFPPT

SEQ ID NO: 25122 - protein, 10 aa, Artificial Sequence
  Synthetic construct
SSYTSSSTFE

SEQ ID NO: 25123 - protein, 10 aa, Artificial Sequence
  Synthetic construct
QHYSNWPPWT

SEQ ID NO: 25124 - protein, 11 aa, Artificial Sequence
  Synthetic construct
GTWDSSLRDVV

SEQ ID NO: 25125 - protein, 9 aa, Artificial Sequence
  Synthetic construct
QQYNSYPYT

SEQ ID NO: 25126 - protein, 9 aa, Artificial Sequence
  Synthetic construct
QQSYSTPRT

SEQ ID NO: 25127 - protein, 9 aa, Artificial Sequence
  Synthetic construct
QQANSFPLT

SEQ ID NO: 25128 - protein, 11 aa, Artificial Sequence
  Synthetic construct
CSYAGSSTYVV

SEQ ID NO: 25129 - protein, 8 aa, Artificial Sequence
  Synthetic construct
QQYDGSPT

SEQ ID NO: 25130 - protein, 9 aa, Artificial Sequence
  Synthetic construct
HQSSSLGYT

SEQ ID NO: 25131 - protein, 10 aa, Artificial Sequence
  Synthetic construct
QQRSNWPPWT

SEQ ID NO: 25132 - protein, 9 aa, Artificial Sequence
  Synthetic construct
LLSYDDVRV

SEQ ID NO: 25133 - protein, 10 aa, Artificial Sequence
  Synthetic construct
QQYNSYSRYT

SEQ ID NO: 25134 - protein, 9 aa, Artificial Sequence
  Synthetic construct
QTWGSTTVV

SEQ ID NO: 25135 - protein, 9 aa, Artificial Sequence
  Synthetic construct
QQGNSFPLT

SEQ ID NO: 25136 - protein, 9 aa, Artificial Sequence
  Synthetic construct
QQSSSDPPT

SEQ ID NO: 25137 - protein, 9 aa, Artificial Sequence
  Synthetic construct
QQYNNWPRT

SEQ ID NO: 25138 - protein, 10 aa, Artificial Sequence
  Synthetic construct
CSYGRTVTFV

SEQ ID NO: 25139 - protein, 10 aa, Artificial Sequence [sequence omitted]

SEQ ID NO: 25140 - protein, 10 aa, Artificial Sequence
  Synthetic construct
QTWGTGIHVV

SEQ ID NO: 25141 - protein, 8 aa, Artificial Sequence
  Synthetic construct
QQYGSSYT

SEQ ID NO: 25142 - protein, 9 aa, Artificial Sequence
  Synthetic construct
QQRSDWPLT

SEQ ID NO: 25143 - protein, 11 aa, Artificial Sequence
  Synthetic construct
AAWDDSLSVVV

SEQ ID NO: 25144 - protein, 9 aa, Artificial Sequence
  Synthetic construct
QTWATGVVV

SEQ ID NO: 25145 - protein, 9 aa, Artificial Sequence
  Synthetic construct
QQRSNWPGT

SEQ ID NO: 25146 - protein, 9 aa, Artificial Sequence
  Synthetic construct
QQSYSTPYT

SEQ ID NO: 25147 - protein, 10 aa, Artificial Sequence
  Synthetic construct
CSYAGSYTFV

SEQ ID NO: 25148 - protein, 4 aa, Artificial Sequence
  Synthetic construct
QART

SEQ ID NO: 25149 - protein, 10 aa, Artificial Sequence
  Synthetic construct
QQSFSTAIVT

SEQ ID NO: 25150 - protein, 11 aa, Artificial Sequence
  Synthetic construct
SAWDDSLSGWV

SEQ ID NO: 25151 - protein, 9 aa, Artificial Sequence
  Synthetic construct
QQYYSTPLT

SEQ ID NO: 25152 - protein, 9 aa, Artificial Sequence
  Synthetic construct
YCAAGNEGI

SEQ ID NO: 25153 - protein, 11 aa, Artificial Sequence
  Synthetic construct
HSRDSSGNPWV

SEQ ID NO: 25154 - protein, 11 aa, Artificial Sequence
  Synthetic construct
QSYDTSLSGSV

SEQ ID NO: 25155 - protein, 10 aa, Artificial Sequence
  Synthetic construct
SSLAGSNNYV

SEQ ID NO: 25156 - protein, 10 aa, Artificial Sequence
  Synthetic construct
VQTLQAPPYT

SEQ ID NO: 25157 - protein, 10 aa, Artificial Sequence
  Synthetic construct
QQYGSSPPLT

SEQ ID NO: 25158 - protein, 9 aa, Artificial Sequence
  Synthetic construct
QQSYGVPPT

SEQ ID NO: 25159 - protein, 12 aa, Artificial Sequence
  Synthetic construct
QVRDSTSGRPYV

SEQ ID NO: 25160 - protein, 9 aa, Artificial Sequence
  Synthetic construct
QQYNSYSYT

SEQ ID NO: 25161 - protein, 9 aa, Artificial Sequence
  Synthetic construct
SSYTSSSRV

SEQ ID NO: 25162 - protein, 9 aa, Artificial Sequence
  Synthetic construct
QQSYTTPRT

SEQ ID NO: 25163 - protein, 11 aa, Artificial Sequence
  Synthetic construct
AAWDDSLSGVV

SEQ ID NO: 25164 - protein, 8 aa, Artificial Sequence
  Synthetic construct
QQYDGSPT

SEQ ID NO: 25165 - protein, 8 aa, Artificial Sequence
  Synthetic construct
QQYDGSPT

SEQ ID NO: 25166 - protein, 9 aa, Artificial Sequence
  Synthetic construct
QQRSRWPGT

SEQ ID NO: 25167 - protein, 9 aa, Artificial Sequence
  Synthetic construct
QAWGSSTVI

SEQ ID NO: 25168 - protein, 9 aa, Artificial Sequence
  Synthetic construct
QQYGSSPYT

SEQ ID NO: 25169 - protein, 9 aa, Artificial Sequence
  Synthetic construct
QQYNSYSWT

SEQ ID NO: 25170 - protein, 9 aa, Artificial Sequence
  Synthetic construct
QQANSFPIT

SEQ ID NO: 25171 - protein, 9 aa, Artificial Sequence
  Synthetic construct
QQYYNTPFT

SEQ ID NO: 25172 - protein, 12 aa, Artificial Sequence
  Synthetic construct
SSYTSSSTLEVV

SEQ ID NO: 25173 - protein, 9 aa, Artificial Sequence
  Synthetic construct
QQYYSYPQT

SEQ ID NO: 25174 - protein, 11 aa, Artificial Sequence
  Synthetic construct
QQLNSYPPALT

SEQ ID NO: 25175 - protein, 9 aa, Artificial Sequence
  Synthetic construct
QQYNNWFAT

SEQ ID NO: 25176 - protein, 9 aa, Artificial Sequence
  Synthetic construct
QKYNSAPFT

SEQ ID NO: 25177 - protein, 11 aa, Artificial Sequence
  Synthetic construct
QQRSNWPPLYT

SEQ ID NO: 25178 - protein, 10 aa, Artificial Sequence
  Synthetic construct
QQYNSYSPYT

SEQ ID NO: 25179 - protein, 9 aa, Artificial Sequence
  Synthetic construct
MQALQTPIT

SEQ ID NO: 25180 - protein, 11 aa, Artificial Sequence
  Synthetic construct
SSYAGSNTLVV

SEQ ID NO: 25181 - protein, 9 aa, Artificial Sequence
  Synthetic construct
LQHNTYPYT

SEQ ID NO: 25182 - protein, 10 aa, Artificial Sequence
  Synthetic construct
QTWGTGINWV

SEQ ID NO: 25183 - protein, 11 aa, Artificial Sequence
  Synthetic construct
AAWDDSLSGVV

SEQ ID NO: 25184 - protein, 11 aa, Artificial Sequence
  Synthetic construct
AAWDDSLSGWV

SEQ ID NO: 25185 - protein, 11 aa, Artificial Sequence
  Synthetic construct
ATWDDSLNGWV

SEQ ID NO: 25186 - protein, 8 aa, Artificial Sequence
  Synthetic construct
MQGTHFLT

SEQ ID NO: 25187 - protein, 9 aa, Artificial Sequence
  Synthetic construct
QQYGSSQYT

SEQ ID NO: 25188 - protein, 9 aa, Artificial Sequence
  Synthetic construct
QQYDNVPYT

SEQ ID NO: 25189 - protein, 9 aa, Artificial Sequence
  Synthetic construct
MQRLEFPLT

SEQ ID NO: 25190 - protein, 10 aa, Artificial Sequence
  Synthetic construct
QSYDTSNLVV

SEQ ID NO: 25191 - protein, 10 aa, Artificial Sequence
  Synthetic construct
SSYTSSSTYV

SEQ ID NO: 25192 - protein, 11 aa, Artificial Sequence
  Synthetic construct
NSRDSSGNLVV

SEQ ID NO: 25193 - protein, 9 aa, Artificial Sequence
  Synthetic construct
QQYGSSVYT

SEQ ID NO: 25194 - protein, 10 aa, Artificial Sequence
  Synthetic construct
NSRDSSGSVV

SEQ ID NO: 25195 - protein, 11 aa, Artificial Sequence
  Synthetic construct
QQRSNWPPAYT

SEQ ID NO: 25196 - protein, 9 aa, Artificial Sequence
  Synthetic construct
QQYNNWPQT

SEQ ID NO: 25197 - protein, 12 aa, Artificial Sequence
  Synthetic construct
QSYDISLSGFVV

SEQ ID NO: 25198 - protein, 9 aa, Artificial Sequence
  Synthetic construct
QQYNSYSGT

SEQ ID NO: 25199 - protein, 9 aa, Artificial Sequence
  Synthetic construct
QAWDSSIVV

SEQ ID NO: 25200 - protein, 9 aa, Artificial Sequence
  Synthetic construct
QTWDTGTVL

SEQ ID NO: 25201 - protein, 10 aa, Artificial Sequence
  Synthetic construct
QQRTIWPPDT

SEQ ID NO: 25202 - protein, 9 aa, Artificial Sequence
  Synthetic construct
QAWDGSTGV

SEQ ID NO: 25203 - protein, 9 aa, Artificial Sequence
  Synthetic construct
QQYNSYSRT

SEQ ID NO: 25204 - protein, 9 aa, Artificial Sequence
  Synthetic construct
QQLNSYPVT

SEQ ID NO: 25205 - protein, 11 aa, Artificial Sequence
  Synthetic construct
GTWDSSLNAYV

SEQ ID NO: 25206 - protein, 9 aa, Artificial Sequence
  Synthetic construct
QRRSNWPFT

SEQ ID NO: 25207 - protein, 10 aa, Artificial Sequence
  Synthetic construct
MQALQTPAWT

SEQ ID NO: 25208 - protein, 11 aa, Artificial Sequence
  Synthetic construct
GTWDSSLSAVV

SEQ ID NO: 25209 - protein, 9 aa, Artificial Sequence
  Synthetic construct
QQYGSSPQT

SEQ ID NO: 25210 - protein, 9 aa, Artificial Sequence
  Synthetic construct
QQSSSTPYT

SEQ ID NO: 25211 - protein, 9 aa, Artificial Sequence
  Synthetic construct
MQGIHLPHT

SEQ ID NO: 25212 - protein, 9 aa, Artificial Sequence
  Synthetic construct
QTWGTGIRV

SEQ ID NO: 25213 - protein, 9 aa, Artificial Sequence
  Synthetic construct
QQYGNSPQT

SEQ ID NO: 25214 - protein, 11 aa, Artificial Sequence
  Synthetic construct
AAWDDSLSGVI

SEQ ID NO: 25215 - protein, 9 aa, Artificial Sequence
  Synthetic construct
QVWDSVTAI

SEQ ID NO: 25216 - protein, 8 aa, Artificial Sequence
  Synthetic construct
QQYDGSPT

SEQ ID NO: 25217 - protein, 9 aa, Artificial Sequence
  Synthetic construct
QQRSNWPAT

SEQ ID NO: 25218 - protein, 9 aa, Artificial Sequence
  Synthetic construct
QQYYSTPQT

SEQ ID NO: 25219 - protein, 9 aa, Artificial Sequence
  Synthetic construct
QHYGSSPLT

SEQ ID NO: 25220 - protein, 9 aa, Artificial Sequence
  Synthetic construct
QAWDTNVAI

SEQ ID NO: 25221 - protein, 9 aa, Artificial Sequence
  Synthetic construct
QQYYSYPLT

SEQ ID NO: 25222 - protein, 9 aa, Artificial Sequence
  Synthetic construct
YCAAGNEGI

SEQ ID NO: 25223 - protein, 11 aa, Artificial Sequence
  Synthetic construct
SSYSSSSRLYV

SEQ ID NO: 25224 - protein, 9 aa, Artificial Sequence
  Synthetic construct
QQRSNWPLT

SEQ ID NO: 25225 - protein, 10 aa, Artificial Sequence
  Synthetic construct
SSFTSRASYV

SEQ ID NO: 25226 - protein, 13 aa, Artificial Sequence
  Synthetic construct
AAWDDSLNGPHSV

SEQ ID NO: 25227 - protein, 9 aa, Artificial Sequence
  Synthetic construct
LQHDRYPPT

SEQ ID NO: 25228 - protein, 10 aa, Artificial Sequence
  Synthetic construct
AAWDDSLSVL

SEQ ID NO: 25229 - protein, 9 aa, Artificial Sequence
  Synthetic construct
QQYGSSPPT

SEQ ID NO: 25230 - protein, 11 aa, Artificial Sequence
  Synthetic construct
STWDSSLRAAV

SEQ ID NO: 25231 - protein, 9 aa, Artificial Sequence
  Synthetic construct
MQALQTPIT

SEQ ID NO: 25232 - protein, 8 aa, Artificial Sequence
  Synthetic construct
QQRSNWWT

SEQ ID NO: 25233 - protein, 9 aa, Artificial Sequence
  Synthetic construct
QQLNSYPLT

SEQ ID NO: 25234 - protein, 9 aa, Artificial Sequence
  Synthetic construct
QRSFSTPWT

SEQ ID NO: 25235 - protein, 9 aa, Artificial Sequence
  Synthetic construct
QQYGTSPRT

SEQ ID NO: 25236 - protein, 9 aa, Artificial Sequence
  Synthetic construct
QQLNVFPLT

SEQ ID NO: 25237 - protein, 12 aa, Artificial Sequence
  Synthetic construct
QSYDTNLSGFWV

SEQ ID NO: 25238 - protein, 9 aa, Artificial Sequence
  Synthetic construct
QQLNIYPRT

SEQ ID NO: 25239 - protein, 9 aa, Artificial Sequence
  Synthetic construct
MQGTHWPIT

SEQ ID NO: 25240 - protein, 9 aa, Artificial Sequence
  Synthetic construct
TQATQFPRT

SEQ ID NO: 25241 - protein, 9 aa, Artificial Sequence
  Synthetic construct
QQYQIYPLT

SEQ ID NO: 25242 - protein, 10 aa, Artificial Sequence
  Synthetic construct
QQYNNWPRYT

SEQ ID NO: 25243 - protein, 9 aa, Artificial Sequence
  Synthetic construct
QTWGTSGAV

SEQ ID NO: 25244 - protein, 11 aa, Artificial Sequence
  Synthetic construct
CSYAGRSVSWV

SEQ ID NO: 25245 - protein, 8 aa, Artificial Sequence
  Synthetic construct
QQYYSTRT

SEQ ID NO: 25246 - protein, 9 aa, Artificial Sequence
  Synthetic construct
QTWGTGIRV

SEQ ID NO: 25247 - protein, 9 aa, Artificial Sequence
  Synthetic construct
QQSYVSPHT

SEQ ID NO: 25248 - protein, 11 aa, Artificial Sequence
  Synthetic construct
QSYDRSLNCFV

SEQ ID NO: 25249 - protein, 10 aa, Artificial Sequence
  Synthetic construct
CSYAGSRTVV

SEQ ID NO: 25250 - protein, 9 aa, Artificial Sequence
  Synthetic construct
QQYNSYSRT

SEQ ID NO: 25251 - protein, 12 aa, Artificial Sequence
  Synthetic construct
NSRDSSGNHLVV

SEQ ID NO: 25252 - protein, 11 aa, Artificial Sequence
  Synthetic construct
AAWDDSLTGYF

SEQ ID NO: 25253 - protein, 11 aa, Artificial Sequence
  Synthetic construct
QTYDNSLSGYV

SEQ ID NO: 25254 - protein, 9 aa, Artificial Sequence
  Synthetic construct
QQYYSYPLT

SEQ ID NO: 25255 - protein, 9 aa, Artificial Sequence
  Synthetic construct
YCAAGNEGI

SEQ ID NO: 25256 - protein, 9 aa, Artificial Sequence
  Synthetic construct
QQSYITPRT

SEQ ID NO: 25257 - protein, 10 aa, Artificial Sequence
  Synthetic construct
SSYTSSSTCV

SEQ ID NO: 25258 - protein, 11 aa, Artificial Sequence
  Synthetic construct
AAWDDSLSGVV

SEQ ID NO: 25259 - protein, 9 aa, Artificial Sequence
  Synthetic construct
QQYYNTPYT

SEQ ID NO: 25260 - protein, 11 aa, Artificial Sequence
  Synthetic construct
AVWDDSLHGPV

SEQ ID NO: 25261 - protein, 11 aa, Artificial Sequence
  Synthetic construct
CSYAGSYTPWV

SEQ ID NO: 25262 - protein, 10 aa, Artificial Sequence
  Synthetic construct
QQYGSSPPYT

SEQ ID NO: 25263 - protein, 11 aa, Artificial Sequence
  Synthetic construct
QSYDNRLSAWV

SEQ ID NO: 25264 - protein, 10 aa, Artificial Sequence
  Synthetic construct
SSYTSSSTWV

SEQ ID NO: 25265 - protein, 11 aa, Artificial Sequence
  Synthetic construct
QSYDSSLRLRV

SEQ ID NO: 25266 - protein, 11 aa, Artificial Sequence
  Synthetic construct
CSYAGSSTLVV

SEQ ID NO: 25267 - protein, 9 aa, Artificial Sequence
  Synthetic construct
QRRSNWPFT

SEQ ID NO: 25268 - protein, 9 aa, Artificial Sequence
  Synthetic construct
EQYGSPPLT

SEQ ID NO: 25269 - protein, 12 aa, Artificial Sequence
  Synthetic construct
GTWDSSLSAGRV

SEQ ID NO: 25270 - protein, 9 aa, Artificial Sequence
  Synthetic construct
QQYLRSGIT

SEQ ID NO: 25271 - protein, 11 aa, Artificial Sequence
  Synthetic construct
SSYTTSTSYLL

SEQ ID NO: 25272 - protein, 9 aa, Artificial Sequence
  Synthetic construct
MQGTNWPRS

SEQ ID NO: 25273 - protein, 10 aa, Artificial Sequence
  Synthetic construct
GAFTTSSTRV

SEQ ID NO: 25274 - protein, 8 aa, Artificial Sequence
  Synthetic construct
QQRSNRVT

SEQ ID NO: 25275 - protein, 9 aa, Artificial Sequence
  Synthetic construct
QHYDSYSVT

SEQ ID NO: 25276 - protein, 9 aa, Artificial Sequence
  Synthetic construct
SSYLTSSPL

SEQ ID NO: 25277 - protein, 11 aa, Artificial Sequence
  Synthetic construct
QAWDTVTALYV

SEQ ID NO: 25278 - protein, 9 aa, Artificial Sequence
  Synthetic construct
QQYSSYSWT

SEQ ID NO: 25279 - protein, 11 aa, Artificial Sequence
  Synthetic construct
AAWDGSLNGLV

SEQ ID NO: 25280 - protein, 11 aa, Artificial Sequence
  Synthetic construct
GTWDSNLKAMV

SEQ ID NO: 25281 - protein, 10 aa, Artificial Sequence
  Synthetic construct
CSYARGSIFV

SEQ ID NO: 25282 - protein, 9 aa, Artificial Sequence
  Synthetic construct
QQSYSTPLT

SEQ ID NO: 25283 - protein, 11 aa, Artificial Sequence
  Synthetic construct
AAWDDSLSAVV

SEQ ID NO: 25284 - protein, 10 aa, Artificial Sequence
  Synthetic construct
SSYTSSSTLV

SEQ ID NO: 25285 - protein, 11 aa, Artificial Sequence
  Synthetic construct
QQLNSYPPGIT

SEQ ID NO: 25286 - protein, 10 aa, Artificial Sequence
  Synthetic construct
SSYTSSSTWV

SEQ ID NO: 25287 - protein, 10 aa, Artificial Sequence
  Synthetic construct
CSYAGSSTYV

SEQ ID NO: 25288 - protein, 11 aa, Artificial Sequence
  Synthetic construct
GTWDSSLSAVV

SEQ ID NO: 25289 - protein, 9 aa, Artificial Sequence
  Synthetic construct
QQYDNVLWT

SEQ ID NO: 25290 - protein, 9 aa, Artificial Sequence
  Synthetic construct
QQYYSAPPT

SEQ ID NO: 25291 - protein, 9 aa, Artificial Sequence
  Synthetic construct
QQRRLWPPS

SEQ ID NO: 25292 - protein, 11 aa, Artificial Sequence
  Synthetic construct
AAWDDSLNGWV

SEQ ID NO: 25293 - protein, 9 aa, Artificial Sequence
  Synthetic construct
QQYNNWPPT

SEQ ID NO: 25294 - protein, 12 aa, Artificial Sequence
  Synthetic construct
SSYTSSSTLEVL

SEQ ID NO: 25295 - protein, 12 aa, Artificial Sequence
  Synthetic construct
NSRDNSGNHPVI

SEQ ID NO: 25296 - protein, 9 aa, Artificial Sequence
  Synthetic construct
QQLNIYPRT

SEQ ID NO: 25297 - protein, 9 aa, Artificial Sequence
  Synthetic construct
QQYNSYSWT

SEQ ID NO: 25298 - protein, 10 aa, Artificial Sequence
  Synthetic construct
NSRDSSGNHV

SEQ ID NO: 25299 - protein, 9 aa, Artificial Sequence
  Synthetic construct
ETWDSVNWV

SEQ ID NO: 25300 - protein, 11 aa, Artificial Sequence
  Synthetic construct
SSYTSTSTYVL

SEQ ID NO: 25301 - protein, 10 aa, Artificial Sequence
  Synthetic construct
QQFGTSPPLT

SEQ ID NO: 25302 - protein, 9 aa, Artificial Sequence
  Synthetic construct
QRSFSTPWT

SEQ ID NO: 25303 - protein, 9 aa, Artificial Sequence
  Synthetic construct
QQYAHSPQT

SEQ ID NO: 25304 - protein, 9 aa, Artificial Sequence
  Synthetic construct
QTWGTGIQV

SEQ ID NO: 25305 - protein, 9 aa, Artificial Sequence
  Synthetic construct
QQSYSTLLT

SEQ ID NO: 25306 - protein, 9 aa, Artificial Sequence
  Synthetic construct
QQYNNWPPL

SEQ ID NO: 25307 - protein, 9 aa, Artificial Sequence
  Synthetic construct
QKYNSAPLT

SEQ ID NO: 25308 - protein, 9 aa, Artificial Sequence
  Synthetic construct
QQTYNIPRT

SEQ ID NO: 25309 - protein, 11 aa, Artificial Sequence
  Synthetic construct
GAWDDNLNGYV

SEQ ID NO: 25310 - protein, 9 aa, Artificial Sequence
  Synthetic construct
QQYNSYPFT

SEQ ID NO: 25311 - protein, 11 aa, Artificial Sequence
  Synthetic construct
QQYNNWPPAWT

SEQ ID NO: 25312 - protein, 8 aa, Artificial Sequence
  Synthetic construct
QQYNSYRT

SEQ ID NO: 25313 - protein, 8 aa, Artificial Sequence
  Synthetic construct
QQYAHLPT

SEQ ID NO: 25314 - protein, 8 aa, Artificial Sequence
  Synthetic construct
QQRSNMVS

SEQ ID NO: 25315 - protein, 10 aa, Artificial Sequence
  Synthetic construct
HQYNKWPPIT

SEQ ID NO: 25316 - protein, 9 aa, Artificial Sequence
  Synthetic construct
MQGTHWPLS

SEQ ID NO: 25317 - protein, 11 aa, Artificial Sequence
  Synthetic construct
AAWDDSLAAYV

SEQ ID NO: 25318 - protein, 10 aa, Artificial Sequence
  Synthetic construct
CSYAGSSTLV

SEQ ID NO: 25319 - protein, 9 aa, Artificial Sequence
  Synthetic construct
QRRSNWPFT

SEQ ID NO: 25320 - protein, 11 aa, Artificial Sequence
  Synthetic construct
AAWDDSLSGRV

SEQ ID NO: 25321 - protein, 9 aa, Artificial Sequence
  Synthetic construct
QQYGSSLFT

SEQ ID NO: 25322 - protein, 10 aa, Artificial Sequence
  Synthetic construct
QQYGSSPPYT

SEQ ID NO: 25323 - protein, 9 aa, Artificial Sequence
  Synthetic construct
HQSSSLPQT

SEQ ID NO: 25324 - protein, 11 aa, Artificial Sequence
  Synthetic construct
VSWDDSLTAVV

SEQ ID NO: 25325 - protein, 10 aa, Artificial Sequence
  Synthetic construct
VLYMGSGISV

SEQ ID NO: 25326 - protein, 9 aa, Artificial Sequence
  Synthetic construct
LLYYGGAYV

SEQ ID NO: 25327 - protein, 10 aa, Artificial Sequence [sequence omitted]

SEQ ID NO: 25328 - protein, 8 aa, Artificial Sequence
  Synthetic construct
SSYTTNVL

SEQ ID NO: 25329 - protein, 11 aa, Artificial Sequence
  Synthetic construct
QVWDSSSDHVV

SEQ ID NO: 25330 - protein, 9 aa, Artificial Sequence
  Synthetic construct
MQSIQVPHT

SEQ ID NO: 25331 - protein, 9 aa, Artificial Sequence
  Synthetic construct
QQYNSYPYT

SEQ ID NO: 25332 - protein, 9 aa, Artificial Sequence
  Synthetic construct
QRSFSTPWT

SEQ ID NO: 25333 - protein, 10 aa, Artificial Sequence
  Synthetic construct
QSTDNSGTYV

SEQ ID NO: 25334 - protein, 10 aa, Artificial Sequence
  Synthetic construct
NSRDSSGNYV

SEQ ID NO: 25335 - protein, 11 aa, Artificial Sequence
  Synthetic construct
AAWDDSLNGVV

SEQ ID NO: 25336 - protein, 11 aa, Artificial Sequence
  Synthetic construct
GTWDSSLSARV

SEQ ID NO: 25337 - protein, 10 aa, Artificial Sequence
  Synthetic construct
SSYSRVTTCV

SEQ ID NO: 25338 - protein, 11 aa, Artificial Sequence
  Synthetic construct
NSRDSSGNHVV

SEQ ID NO: 25339 - protein, 9 aa, Artificial Sequence
  Synthetic construct
QKRSNWPFT

SEQ ID NO: 25340 - protein, 9 aa, Artificial Sequence
  Synthetic construct
QQSFASPYT

SEQ ID NO: 25341 - protein, 10 aa, Artificial Sequence
  Synthetic construct
MQGTHWPALT

SEQ ID NO: 25342 - protein, 9 aa, Artificial Sequence
  Synthetic construct
QAWDNRRGF

SEQ ID NO: 25343 - protein, 8 aa, Artificial Sequence
  Synthetic construct
LLLCSDWV

SEQ ID NO: 25344 - protein, 9 aa, Artificial Sequence
  Synthetic construct
QHYNSYSVT

SEQ ID NO: 25345 - protein, 9 aa, Artificial Sequence
  Synthetic construct
QHYNNYPWT

SEQ ID NO: 25346 - protein, 9 aa, Artificial Sequence
  Synthetic construct
QQYYSTLWT

SEQ ID NO: 25347 - protein, 9 aa, Artificial Sequence
  Synthetic construct
QQSYSTPYT

SEQ ID NO: 25348 - protein, 9 aa, Artificial Sequence
  Synthetic construct
QQLNSYPRT

SEQ ID NO: 25349 - protein, 9 aa, Artificial Sequence
  Synthetic construct
ETWDSNTRV

SEQ ID NO: 25350 - protein, 9 aa, Artificial Sequence
  Synthetic construct
CSYAGSEVV

SEQ ID NO: 25351 - protein, 10 aa, Artificial Sequence
  Synthetic construct
QQRSNWPPIT

SEQ ID NO: 25352 - protein, 10 aa, Artificial Sequence
  Synthetic construct
QQGSSFPHLT

SEQ ID NO: 25353 - protein, 10 aa, Artificial Sequence
  Synthetic construct
QQYGSSPPYT

SEQ ID NO: 25354 - protein, 8 aa, Artificial Sequence
  Synthetic construct
QQYDGSPT

SEQ ID NO: 25355 - protein, 10 aa, Artificial Sequence
  Synthetic construct
SSYAGGNNFV

SEQ ID NO: 25356 - protein, 9 aa, Artificial Sequence
  Synthetic construct
QQHGSSPIT

SEQ ID NO: 25357 - protein, 9 aa, Artificial Sequence
  Synthetic construct
QRSFSTPWT

SEQ ID NO: 25358 - protein, 10 aa, Artificial Sequence
  Synthetic construct
QQYKDWPPWT

SEQ ID NO: 25359 - protein, 9 aa, Artificial Sequence
  Synthetic construct
QQYNSYPRT

SEQ ID NO: 25360 - protein, 9 aa, Artificial Sequence
  Synthetic construct
QTWGTGIRV

SEQ ID NO: 25361 - protein, 8 aa, Artificial Sequence
  Synthetic construct
QQYNSFST

SEQ ID NO: 25362 - protein, 9 aa, Artificial Sequence
  Synthetic construct
QQFDSLPIT

SEQ ID NO: 25363 - protein, 9 aa, Artificial Sequence
  Synthetic construct
QNYISAPLT

SEQ ID NO: 25364 - protein, 9 aa, Artificial Sequence
  Synthetic construct
QQYYSYPWA

SEQ ID NO: 25365 - protein, 9 aa, Artificial Sequence
  Synthetic construct
HQYSTSPRS

SEQ ID NO: 25366 - protein, 10 aa, Artificial Sequence
  Synthetic construct
LLYMSYGMRV

SEQ ID NO: 25367 - protein, 9 aa, Artificial Sequence
  Synthetic construct
QQYGSSPRT

SEQ ID NO: 25368 - protein, 9 aa, Artificial Sequence
  Synthetic construct
QTWGTGIRV

SEQ ID NO: 25369 - protein, 9 aa, Artificial Sequence
  Synthetic construct
QSYDGTNWV

SEQ ID NO: 25370 - protein, 11 aa, Artificial Sequence
  Synthetic construct
QSYDRSLSASV

SEQ ID NO: 25371 - protein, 9 aa, Artificial Sequence
  Synthetic construct
MQAIDVPYT

SEQ ID NO: 25372 - protein, 8 aa, Artificial Sequence
  Synthetic construct
QQYGSSPL

SEQ ID NO: 25373 - protein, 11 aa, Artificial Sequence
  Synthetic construct
TSRDSGGNHWV

SEQ ID NO: 25374 - protein, 8 aa, Artificial Sequence
  Synthetic construct
QQYDGSPT

SEQ ID NO: 25375 - protein, 10 aa, Artificial Sequence
  Synthetic construct
QQYYSYPQIT

SEQ ID NO: 25376 - protein, 10 aa, Artificial Sequence
  Synthetic construct
MQALQTPRWT

SEQ ID NO: 25377 - protein, 10 aa, Artificial Sequence
  Synthetic construct
QAWDSSTGGV

SEQ ID NO: 25378 - protein, 11 aa, Artificial Sequence
  Synthetic construct
STWDSSLNAVI

SEQ ID NO: 25379 - protein, 9 aa, Artificial Sequence
  Synthetic construct
QTWDTGYAV

SEQ ID NO: 25380 - protein, 11 aa, Artificial Sequence
  Synthetic construct
AAWDDSLSGVV

SEQ ID NO: 25381 - protein, 10 aa, Artificial Sequence
  Synthetic construct
SSYTSSSPVV

SEQ ID NO: 25382 - protein, 9 aa, Artificial Sequence
  Synthetic construct
QQTYSSVYS

SEQ ID NO: 25383 - protein, 9 aa, Artificial Sequence
  Synthetic construct
QTWATGVVV

SEQ ID NO: 25384 - protein, 9 aa, Artificial Sequence
  Synthetic construct
MQGIHLPPT

SEQ ID NO: 25385 - protein, 11 aa, Artificial Sequence
  Synthetic construct
CSYAGSSTFYV

SEQ ID NO: 25386 - protein, 9 aa, Artificial Sequence
  Synthetic construct
QQVNTYPRT

SEQ ID NO: 25387 - protein, 9 aa, Artificial Sequence
  Synthetic construct
QQNYNDPPS

SEQ ID NO: 25388 - protein, 11 aa, Artificial Sequence
  Synthetic construct
QVWDSSSDHVV

SEQ ID NO: 25389 - protein, 8 aa, Artificial Sequence
  Synthetic construct
QQYNKWYT

SEQ ID NO: 25390 - protein, 9 aa, Artificial Sequence
  Synthetic construct
QQYYSTPLT

SEQ ID NO: 25391 - protein, 9 aa, Artificial Sequence
  Synthetic construct
MQATHWPRT

SEQ ID NO: 25392 - protein, 11 aa, Artificial Sequence
  Synthetic construct
QQYNNWPPRRT

SEQ ID NO: 25393 - protein, 9 aa, Artificial Sequence
  Synthetic construct
QHYNGYPFT

SEQ ID NO: 25394 - protein, 9 aa, Artificial Sequence
  Synthetic construct
QQYDTTPFT

SEQ ID NO: 25395 - protein, 8 aa, Artificial Sequence
  Synthetic construct
QEYNSVWT

SEQ ID NO: 25396 - protein, 11 aa, Artificial Sequence
  Synthetic construct
GTWDSGLSAGV

SEQ ID NO: 25397 - protein, 10 aa, Artificial Sequence
  Synthetic construct
CSYARGSIFV

SEQ ID NO: 25398 - protein, 8 aa, Artificial Sequence
  Synthetic construct
QQSYSTPT

SEQ ID NO: 25399 - protein, 9 aa, Artificial Sequence
  Synthetic construct
QRSFSTPWT

SEQ ID NO: 25400 - protein, 9 aa, Artificial Sequence
  Synthetic construct
QQYHTWPRT

SEQ ID NO: 25401 - protein, 11 aa, Artificial Sequence
  Synthetic construct
AAWDDSLSGVI

SEQ ID NO: 25402 - protein, 9 aa, Artificial Sequence
  Synthetic construct
QQSYTLPLT

SEQ ID NO: 25403 - protein, 8 aa, Artificial Sequence
  Synthetic construct
QQYDGSPT

SEQ ID NO: 25404 - protein, 8 aa, Artificial Sequence
  Synthetic construct
QQYDGSPT

SEQ ID NO: 25405 - protein, 10 aa, Artificial Sequence
  Synthetic construct
QSADSSGTRV

SEQ ID NO: 25406 - protein, 9 aa, Artificial Sequence
  Synthetic construct
QQYYSTPLT

SEQ ID NO: 25407 - protein, 10 aa, Artificial Sequence
  Synthetic construct
QQYDDWPPLT

SEQ ID NO: 25408 - protein, 11 aa, Artificial Sequence
  Synthetic construct
QQYGYADSSWT

SEQ ID NO: 25409 - protein, 10 aa, Artificial Sequence
  Synthetic construct
QQYYSTPTLT

SEQ ID NO: 25410 - protein, 12 aa, Artificial Sequence
  Synthetic construct
NSRDSSGNHNYV

SEQ ID NO: 25411 - protein, 12 aa, Artificial Sequence
  Synthetic construct
SSYTRTSTSLYV

SEQ ID NO: 25412 - protein, 11 aa, Artificial Sequence
  Synthetic construct
QQRSNWPPLFT

SEQ ID NO: 25413 - protein, 9 aa, Artificial Sequence
  Synthetic construct
QQYYNTPRT

SEQ ID NO: 25414 - protein, 9 aa, Artificial Sequence
  Synthetic construct
QQYYSTPLT

SEQ ID NO: 25415 - protein, 11 aa, Artificial Sequence
  Synthetic construct
NSRDSSGNHVV

SEQ ID NO: 25416 - protein, 9 aa, Artificial Sequence
  Synthetic construct
QQSYSTPPT

SEQ ID NO: 25417 - protein, 10 aa, Artificial Sequence
  Synthetic construct
MQGTHWPLLT

SEQ ID NO: 25418 - protein, 11 aa, Artificial Sequence
  Synthetic construct
AAWDDRLNGVV

SEQ ID NO: 25419 - protein, 11 aa, Artificial Sequence
  Synthetic construct
QVWDSSSDHVV

SEQ ID NO: 25420 - protein, 9 aa, Artificial Sequence
  Synthetic construct
MQALQTPIT

SEQ ID NO: 25421 - protein, 10 aa, Artificial Sequence
  Synthetic construct
QTWGTGAHVV

SEQ ID NO: 25422 - protein, 9 aa, Artificial Sequence
  Synthetic construct
QAWDTGTVV

SEQ ID NO: 25423 - protein, 10 aa, Artificial Sequence
  Synthetic construct
SSYAGNNRGV

SEQ ID NO: 25424 - protein, 11 aa, Artificial Sequence
  Synthetic construct
AAWDDSLSGVI

SEQ ID NO: 25425 - protein, 8 aa, Artificial Sequence
  Synthetic construct
QQYNSYFS

SEQ ID NO: 25426 - protein, 9 aa, Artificial Sequence
  Synthetic construct
QKYNSAPWT

SEQ ID NO: 25427 - protein, 9 aa, Artificial Sequence
  Synthetic construct
QQYGSSPPT

SEQ ID NO: 25428 - protein, 9 aa, Artificial Sequence
  Synthetic construct
QQTYNIPRT

SEQ ID NO: 25429 - protein, 10 aa, Artificial Sequence
  Synthetic construct
QQYYSTLPYT

SEQ ID NO: 25430 - protein, 9 aa, Artificial Sequence
  Synthetic construct
QQYSSYSWT

SEQ ID NO: 25431 - protein, 9 aa, Artificial Sequence
  Synthetic construct
QQYYNYPWA

SEQ ID NO: 25432 - protein, 9 aa, Artificial Sequence
  Synthetic construct
QQSYSTLLT

SEQ ID NO: 25433 - protein, 9 aa, Artificial Sequence
  Synthetic construct
QKSDSAPFT

SEQ ID NO: 25434 - protein, 11 aa, Artificial Sequence
  Synthetic construct
TSRDSGGNHWV

SEQ ID NO: 25435 - protein, 8 aa, Artificial Sequence
  Synthetic construct
QQYNSYST

SEQ ID NO: 25436 - protein, 9 aa, Artificial Sequence
  Synthetic construct
QQYYHTPYT

SEQ ID NO: 25437 - protein, 10 aa, Artificial Sequence
  Synthetic construct
SSYTSSSTWV

SEQ ID NO: 25438 - protein, 11 aa, Artificial Sequence
  Synthetic construct
VTWDISLRAVV

SEQ ID NO: 25439 - protein, 11 aa, Artificial Sequence
  Synthetic construct
NSRDSSGNHRV

SEQ ID NO: 25440 - protein, 9 aa, Artificial Sequence
  Synthetic construct
MQALQTPYT

SEQ ID NO: 25441 - protein, 9 aa, Artificial Sequence
  Synthetic construct
MQGLQTPWT

SEQ ID NO: 25442 - protein, 11 aa, Artificial Sequence
  Synthetic construct
QQYNNWPPVYT

SEQ ID NO: 25443 - protein, 11 aa, Artificial Sequence
  Synthetic construct
TSRDSGGNHWV

SEQ ID NO: 25444 - protein, 9 aa, Artificial Sequence
  Synthetic construct
QQSYSPPYT

SEQ ID NO: 25445 - protein, 8 aa, Artificial Sequence
  Synthetic construct
MQGIHPYT

SEQ ID NO: 25446 - protein, 9 aa, Artificial Sequence
  Synthetic construct
HQSSSFPYT

SEQ ID NO: 25447 - protein, 9 aa, Artificial Sequence
  Synthetic construct
QAWDSSTDV

SEQ ID NO: 25448 - protein, 9 aa, Artificial Sequence
  Synthetic construct
QQTYTDPFT

SEQ ID NO: 25449 - protein, 9 aa, Artificial Sequence
  Synthetic construct
QQRGDWPRT

SEQ ID NO: 25450 - protein, 8 aa, Artificial Sequence
  Synthetic construct
QQRSNPLT

SEQ ID NO: 25451 - protein, 11 aa, Artificial Sequence
  Synthetic construct
QAWDTNTAFFV

SEQ ID NO: 25452 - protein, 11 aa, Artificial Sequence
  Synthetic construct
AAWDDSLKGYV

SEQ ID NO: 25453 - protein, 9 aa, Artificial Sequence
  Synthetic construct
QQRYNWPIT

SEQ ID NO: 25454 - protein, 10 aa, Artificial Sequence
  Synthetic construct
CSYARGSIFV

SEQ ID NO: 25455 - protein, 11 aa, Artificial Sequence
  Synthetic construct
AAWDNRLAGPL

SEQ ID NO: 25456 - protein, 9 aa, Artificial Sequence
  Synthetic construct
QQSYSTPWT

SEQ ID NO: 25457 - protein, 9 aa, Artificial Sequence
  Synthetic construct
QQSYSIPLT

SEQ ID NO: 25458 - protein, 10 aa, Artificial Sequence
  Synthetic construct
AAVTPTNTWV

SEQ ID NO: 25459 - protein, 11 aa, Artificial Sequence
  Synthetic construct
FSTDSSGDHGV

SEQ ID NO: 25460 - protein, 9 aa, Artificial Sequence
  Synthetic construct
QQFNNYPWT

SEQ ID NO: 25461 - protein, 9 aa, Artificial Sequence
  Synthetic construct
QQYYSTPYT

SEQ ID NO: 25462 - protein, 9 aa, Artificial Sequence
  Synthetic construct
QQSYSTPQT

SEQ ID NO: 25463 - protein, 9 aa, Artificial Sequence
  Synthetic construct
QQSFSTFLT

SEQ ID NO: 25464 - protein, 10 aa, Artificial Sequence
  Synthetic construct
CSYARGSIFV

SEQ ID NO: 25465 - protein, 8 aa, Artificial Sequence
  Synthetic construct
MQGTHWPT

SEQ ID NO: 25466 - protein, 9 aa, Artificial Sequence
  Synthetic construct
QQSYSTLLT

SEQ ID NO: 25467 - protein, 11 aa, Artificial Sequence
  Synthetic construct
AAWDDNLSGRV

SEQ ID NO: 25468 - protein, 10 aa, Artificial Sequence
  Synthetic construct
QAWDSNTAVV

SEQ ID NO: 25469 - protein, 11 aa, Artificial Sequence
  Synthetic construct
SSYSSGSTLYV

SEQ ID NO: 25470 - protein, 9 aa, Artificial Sequence
  Synthetic construct
QNYNSGPQT

SEQ ID NO: 25471 - protein, 12 aa, Artificial Sequence
  Synthetic construct
QSYDSSLSVLYV

SEQ ID NO: 25472 - protein, 11 aa, Artificial Sequence
  Synthetic construct
QSYDSSLSGWV

SEQ ID NO: 25473 - protein, 9 aa, Artificial Sequence
  Synthetic construct
QQYGSSPRT

SEQ ID NO: 25474 - protein, 9 aa, Artificial Sequence
  Synthetic construct
QQFNSYPFT

SEQ ID NO: 25475 - protein, 9 aa, Artificial Sequence
  Synthetic construct
QQANSFPLT

SEQ ID NO: 25476 - protein, 9 aa, Artificial Sequence
  Synthetic construct
QRSFSTPWT

SEQ ID NO: 25477 - protein, 10 aa, Artificial Sequence
  Synthetic construct
CSYAGSRSVV

SEQ ID NO: 25478 - protein, 10 aa, Artificial Sequence
  Synthetic construct
AAWDESLKGV

SEQ ID NO: 25479 - protein, 8 aa, Artificial Sequence
  Synthetic construct
QQYNSYWT

SEQ ID NO: 25480 - protein, 9 aa, Artificial Sequence
  Synthetic construct
QSYDSSTWV

SEQ ID NO: 25481 - protein, 10 aa, Artificial Sequence
  Synthetic construct
SAYTTSGSTV

SEQ ID NO: 25482 - protein, 10 aa, Artificial Sequence
  Synthetic construct
QHYNNWPPWT

SEQ ID NO: 25483 - protein, 10 aa, Artificial Sequence
  Synthetic construct
QQYNSYSGLT

SEQ ID NO: 25484 - protein, 10 aa, Artificial Sequence
  Synthetic construct
QQYTTYRALS

SEQ ID NO: 25485 - protein, 11 aa, Artificial Sequence
  Synthetic construct
AAWDDSLSGVV

SEQ ID NO: 25486 - protein, 9 aa, Artificial Sequence
  Synthetic construct
MQALQTPYT

SEQ ID NO: 25487 - protein, 9 aa, Artificial Sequence
  Synthetic construct
QQSYNTPRT

SEQ ID NO: 25488 - protein, 11 aa, Artificial Sequence
  Synthetic construct
QVWDGSSNRVV

SEQ ID NO: 25489 - protein, 9 aa, Artificial Sequence
  Synthetic construct
QQYDNVPLT

SEQ ID NO: 25490 - protein, 8 aa, Artificial Sequence
  Synthetic construct
QQSYSTPF

SEQ ID NO: 25491 - protein, 9 aa, Artificial Sequence
  Synthetic construct
QQYGRSPYT

SEQ ID NO: 25492 - protein, 9 aa, Artificial Sequence
  Synthetic construct
QQSYSTFYT

SEQ ID NO: 25493 - protein, 9 aa, Artificial Sequence
  Synthetic construct
QQYSDFPWT

SEQ ID NO: 25494 - protein, 9 aa, Artificial Sequence
  Synthetic construct
QQYNQWALT

SEQ ID NO: 25495 - protein, 12 aa, Artificial Sequence
  Synthetic construct
ASYTSRSTLEVE

SEQ ID NO: 25496 - protein, 11 aa, Artificial Sequence
  Synthetic construct
SAWDNNLEAYV

SEQ ID NO: 25497 - protein, 11 aa, Artificial Sequence
  Synthetic construct
FSTDSSGDHGV

SEQ ID NO: 25498 - protein, 10 aa, Artificial Sequence
  Synthetic construct
MQGTHWPPFT

SEQ ID NO: 25499 - protein, 10 aa, Artificial Sequence
  Synthetic construct
QQYYSYPPWT

SEQ ID NO: 25500 - protein, 9 aa, Artificial Sequence
  Synthetic construct
QQYYLPPWT

SEQ ID NO: 25501 - protein, 8 aa, Artificial Sequence
  Synthetic construct
QQSYSSPT

SEQ ID NO: 25502 - protein, 9 aa, Artificial Sequence
  Synthetic construct
QQYYSYPRT

SEQ ID NO: 25503 - protein, 12 aa, Artificial Sequence
  Synthetic construct
AAWDDSLNGPWV

SEQ ID NO: 25504 - protein, 8 aa, Artificial Sequence
  Synthetic construct
MQGTHFLT

SEQ ID NO: 25505 - protein, 9 aa, Artificial Sequence
  Synthetic construct
QQYNNWRVT

SEQ ID NO: 25506 - protein, 9 aa, Artificial Sequence
  Synthetic construct
QQYYSYPYT

SEQ ID NO: 25507 - protein, 9 aa, Artificial Sequence
  Synthetic construct
QQRSRWPGT

SEQ ID NO: 25508 - protein, 10 aa, Artificial Sequence
  Synthetic construct
QQYNNWPPYT

SEQ ID NO: 25509 - protein, 9 aa, Artificial Sequence
  Synthetic construct
QQYYSYPYT

SEQ ID NO: 25510 - protein, 10 aa, Artificial Sequence
  Synthetic construct
SSYTSSNTQV

SEQ ID NO: 25511 - protein, 10 aa, Artificial Sequence
  Synthetic construct
NSYTSSGTLV

SEQ ID NO: 25512 - protein, 9 aa, Artificial Sequence
  Synthetic construct
QQYYNTPRT

SEQ ID NO: 25513 - protein, 11 aa, Artificial Sequence
  Synthetic construct
QHRSNWPLLIT

SEQ ID NO: 25514 - protein, 9 aa, Artificial Sequence
  Synthetic construct
QQSYLTPRT

SEQ ID NO: 25515 - protein, 9 aa, Artificial Sequence
  Synthetic construct
QQSYSTPRT

SEQ ID NO: 25516 - protein, 9 aa, Artificial Sequence
  Synthetic construct
QRSFSTPWT

SEQ ID NO: 25517 - protein, 9 aa, Artificial Sequence
  Synthetic construct
QQSYSTLIT

SEQ ID NO: 25518 - protein, 9 aa, Artificial Sequence
  Synthetic construct
QQYNHYPLT

SEQ ID NO: 25519 - protein, 11 aa, Artificial Sequence
  Synthetic construct
CSYGPTGTSIL

SEQ ID NO: 25520 - protein, 12 aa, Artificial Sequence
  Synthetic construct
ASYTSSSTLEVV

SEQ ID NO: 25521 - protein, 9 aa, Artificial Sequence
  Synthetic construct
MIWHSSAWV

SEQ ID NO: 25522 - protein, 12 aa, Artificial Sequence
  Synthetic construct
TSYTSTSTLEVV

SEQ ID NO: 25523 - protein, 10 aa, Artificial Sequence
  Synthetic construct
QQYGISPRYT

SEQ ID NO: 25524 - protein, 10 aa, Artificial Sequence
  Synthetic construct
QQSYSTPTWT

SEQ ID NO: 25525 - protein, 9 aa, Artificial Sequence
  Synthetic construct
QQYNSYSWT

SEQ ID NO: 25526 - protein, 9 aa, Artificial Sequence
  Synthetic construct
QQYYSYPRT

SEQ ID NO: 25527 - protein, 9 aa, Artificial Sequence
  Synthetic construct
QQYYSYPYT

SEQ ID NO: 25528 - protein, 9 aa, Artificial Sequence
  Synthetic construct
QRRSNWPFT

SEQ ID NO: 25529 - protein, 10 aa, Artificial Sequence [sequence omitted]

SEQ ID NO: 25530 - protein, 8 aa, Artificial Sequence
  Synthetic construct
QQRSNSIT

SEQ ID NO: 25531 - protein, 9 aa, Artificial Sequence
  Synthetic construct
QQYGSSPRT

SEQ ID NO: 25532 - protein, 8 aa, Artificial Sequence
  Synthetic construct
MQALQPHT

SEQ ID NO: 25533 - protein, 9 aa, Artificial Sequence
  Synthetic construct
TQATQFPIT

SEQ ID NO: 25534 - protein, 9 aa, Artificial Sequence
  Synthetic construct
QQYYSTPPT

SEQ ID NO: 25535 - protein, 9 aa, Artificial Sequence
  Synthetic construct
QTWGTGFWV

SEQ ID NO: 25536 - protein, 11 aa, Artificial Sequence
  Synthetic construct
ATWDDSVSGVV

SEQ ID NO: 25537 - protein, 9 aa, Artificial Sequence
  Synthetic construct
QQYNRYPGT

SEQ ID NO: 25538 - protein, 10 aa, Artificial Sequence
  Synthetic construct
SSYTSSSTYV

SEQ ID NO: 25539 - protein, 10 aa, Artificial Sequence
  Synthetic construct
CSYARGSIFV

SEQ ID NO: 25540 - protein, 9 aa, Artificial Sequence
  Synthetic construct
TQSKQFPYT

SEQ ID NO: 25541 - protein, 8 aa, Artificial Sequence
  Synthetic construct
QQYGSSYT

SEQ ID NO: 25542 - protein, 9 aa, Artificial Sequence
  Synthetic construct
QQANSFPIT

SEQ ID NO: 25543 - protein, 11 aa, Artificial Sequence
  Synthetic construct
AAWDDSLSGAV

SEQ ID NO: 25544 - protein, 8 aa, Artificial Sequence
  Synthetic construct
QHRSNGYN

SEQ ID NO: 25545 - protein, 9 aa, Artificial Sequence
  Synthetic construct
LQHNSYPWT

SEQ ID NO: 25546 - protein, 9 aa, Artificial Sequence
  Synthetic construct
QTWGTGIRV

SEQ ID NO: 25547 - protein, 10 aa, Artificial Sequence
  Synthetic construct
NSYTTSSTWV

SEQ ID NO: 25548 - protein, 11 aa, Artificial Sequence
  Synthetic construct
SSYTSSSTPYV

SEQ ID NO: 25549 - protein, 8 aa, Artificial Sequence
  Synthetic construct
QTWGAGRV

SEQ ID NO: 25550 - protein, 10 aa, Artificial Sequence
  Synthetic construct
LLYYGGALWV

SEQ ID NO: 25551 - protein, 10 aa, Artificial Sequence
  Synthetic construct
CSYARGSIFV

SEQ ID NO: 25552 - protein, 9 aa, Artificial Sequence
  Synthetic construct
QQSYSTPLT

SEQ ID NO: 25553 - protein, 9 aa, Artificial Sequence
  Synthetic construct
QQYGSSPVT

SEQ ID NO: 25554 - protein, 10 aa, Artificial Sequence
  Synthetic construct
QQYNNWPPLT

SEQ ID NO: 25555 - protein, 9 aa, Artificial Sequence
  Synthetic construct
MQALQTPLT

SEQ ID NO: 25556 - protein, 9 aa, Artificial Sequence
  Synthetic construct
QQYNSYSKT

SEQ ID NO: 25557 - protein, 9 aa, Artificial Sequence
  Synthetic construct
QQSYSTPRT

SEQ ID NO: 25558 - protein, 9 aa, Artificial Sequence
  Synthetic construct
QQYNSYSYT

SEQ ID NO: 25559 - protein, 12 aa, Artificial Sequence
  Synthetic construct
TSYTSTSTLEVV

SEQ ID NO: 25560 - protein, 9 aa, Artificial Sequence
  Synthetic construct
QQSYSTPRT

SEQ ID NO: 25561 - protein, 10 aa, Artificial Sequence
  Synthetic construct
VQGTHWPPLT

SEQ ID NO: 25562 - protein, 11 aa, Artificial Sequence
  Synthetic construct
SSYTSSSTPYV

SEQ ID NO: 25563 - protein, 9 aa, Artificial Sequence
  Synthetic construct
QQRGNWPLT

SEQ ID NO: 25564 - protein, 9 aa, Artificial Sequence
  Synthetic construct
QQYYSTPHT

SEQ ID NO: 25565 - protein, 11 aa, Artificial Sequence
  Synthetic construct
GTWDSSLSAVV

SEQ ID NO: 25566 - protein, 9 aa, Artificial Sequence
  Synthetic construct
QTWDSDIVF

SEQ ID NO: 25567 - protein, 10 aa, Artificial Sequence
  Synthetic construct
SSYSRVTTCV

SEQ ID NO: 25568 - protein, 13 aa, Artificial Sequence
  Synthetic construct
GADHGAGDMFVYV

SEQ ID NO: 25569 - protein, 9 aa, Artificial Sequence
  Synthetic construct
QQYNSYSRT

SEQ ID NO: 25570 - protein, 10 aa, Artificial Sequence
  Synthetic construct
CSYAGRYTHV

SEQ ID NO: 25571 - protein, 12 aa, Artificial Sequence
  Synthetic construct
GAWDPSLSAGRV

SEQ ID NO: 25572 - protein, 9 aa, Artificial Sequence
  Synthetic construct
QQYYSTPPT

SEQ ID NO: 25573 - protein, 9 aa, Artificial Sequence
  Synthetic construct
QQYYSTPWT

SEQ ID NO: 25574 - protein, 9 aa, Artificial Sequence
  Synthetic construct
QQFDNLPIT

SEQ ID NO: 25575 - protein, 9 aa, Artificial Sequence
  Synthetic construct
QQYYSYPLT

SEQ ID NO: 25576 - protein, 9 aa, Artificial Sequence
  Synthetic construct
QQYNSYPWT

SEQ ID NO: 25577 - protein, 9 aa, Artificial Sequence
  Synthetic construct
QAWDSSSGV

SEQ ID NO: 25578 - protein, 9 aa, Artificial Sequence
  Synthetic construct
QQSYSTPYT

SEQ ID NO: 25579 - protein, 9 aa, Artificial Sequence
  Synthetic construct
QQSYSTPQT

SEQ ID NO: 25580 - protein, 9 aa, Artificial Sequence
  Synthetic construct
QQTYSVPWT

SEQ ID NO: 25581 - protein, 10 aa, Artificial Sequence
  Synthetic construct
AAWDDSLFVV

SEQ ID NO: 25582 - protein, 9 aa, Artificial Sequence
  Synthetic construct
QQSYSTPRT

SEQ ID NO: 25583 - protein, 9 aa, Artificial Sequence
  Synthetic construct
QQSYSTPLT

SEQ ID NO: 25584 - protein, 10 aa, Artificial Sequence
  Synthetic construct
QQYNNWPPYT

SEQ ID NO: 25585 - protein, 10 aa, Artificial Sequence
  Synthetic construct
QQYGIWPPIT

SEQ ID NO: 25586 - protein, 9 aa, Artificial Sequence
  Synthetic construct
MQGTEWPRT

SEQ ID NO: 25587 - protein, 12 aa, Artificial Sequence
  Synthetic construct
AAWDDSLYGHLL

SEQ ID NO: 25588 - protein, 9 aa, Artificial Sequence
  Synthetic construct
QQYSSFPRT

SEQ ID NO: 25589 - protein, 9 aa, Artificial Sequence
  Synthetic construct
QQYDRYWWT

SEQ ID NO: 25590 - protein, 10 aa, Artificial Sequence
  Synthetic construct
QQYNNWPMYT

SEQ ID NO: 25591 - protein, 8 aa, Artificial Sequence
  Synthetic construct
QQYHRWPT

SEQ ID NO: 25592 - protein, 9 aa, Artificial Sequence
  Synthetic construct
QQYYSYPQT

SEQ ID NO: 25593 - protein, 11 aa, Artificial Sequence
  Synthetic construct
AVWDDSLNGWV

SEQ ID NO: 25594 - protein, 10 aa, Artificial Sequence
  Synthetic construct
VLYMGSGIWV

SEQ ID NO: 25595 - protein, 9 aa, Artificial Sequence
  Synthetic construct
QQYYSYPLT

SEQ ID NO: 25596 - protein, 12 aa, Artificial Sequence
  Synthetic construct
CSYRGSSTLDVV

SEQ ID NO: 25597 - protein, 9 aa, Artificial Sequence
  Synthetic construct
QQTYNIPRT

SEQ ID NO: 25598 - protein, 10 aa, Artificial Sequence
  Synthetic construct
QQYGSSPRLT

SEQ ID NO: 25599 - protein, 10 aa, Artificial Sequence
  Synthetic construct
QQYNNWPPLT

SEQ ID NO: 25600 - protein, 9 aa, Artificial Sequence
  Synthetic construct
QQYGSSPLT

SEQ ID NO: 25601 - protein, 10 aa, Artificial Sequence
  Synthetic construct
QQYNSYSTWT

SEQ ID NO: 25602 - protein, 5 aa, Artificial Sequence
  Synthetic construct
QQFFT

SEQ ID NO: 25603 - protein, 11 aa, Artificial Sequence
  Synthetic construct
NSRDTSDNRVV

SEQ ID NO: 25604 - protein, 9 aa, Artificial Sequence
  Synthetic construct
QQFDHLPIT

SEQ ID NO: 25605 - protein, 9 aa, Artificial Sequence
  Synthetic construct
MQALETPLT

SEQ ID NO: 25606 - protein, 10 aa, Artificial Sequence
  Synthetic construct
QQYNSSPPIT

SEQ ID NO: 25607 - protein, 10 aa, Artificial Sequence
  Synthetic construct
SSYTSSRLYV

SEQ ID NO: 25608 - protein, 10 aa, Artificial Sequence
  Synthetic construct
MQGTHWPLYT

SEQ ID NO: 25609 - protein, 11 aa, Artificial Sequence
  Synthetic construct
NSRDSSGNHVV

SEQ ID NO: 25610 - protein, 9 aa, Artificial Sequence
  Synthetic construct
QQYNSYSGT

SEQ ID NO: 25611 - protein, 12 aa, Artificial Sequence
  Synthetic construct
QSYDSGLSGLDV

SEQ ID NO: 25612 - protein, 11 aa, Artificial Sequence
  Synthetic construct
QVWINIGDHRV

SEQ ID NO: 25613 - protein, 11 aa, Artificial Sequence
  Synthetic construct
AAWDDSLSGQV

SEQ ID NO: 25614 - protein, 8 aa, Artificial Sequence
  Synthetic construct
QQYNSGWT

SEQ ID NO: 25615 - protein, 9 aa, Artificial Sequence
  Synthetic construct
MQALQIPPT

SEQ ID NO: 25616 - protein, 9 aa, Artificial Sequence
  Synthetic construct
QQSYNTPRT

SEQ ID NO: 25617 - protein, 8 aa, Artificial Sequence
  Synthetic construct
MQALQTYT

SEQ ID NO: 25618 - protein, 9 aa, Artificial Sequence
  Synthetic construct
SSYTSSTVV

SEQ ID NO: 25619 - protein, 9 aa, Artificial Sequence
  Synthetic construct
MQGLHIPWT

SEQ ID NO: 25620 - protein, 9 aa, Artificial Sequence
  Synthetic construct
QQYYSTPLT

SEQ ID NO: 25621 - protein, 11 aa, Artificial Sequence
  Synthetic construct
AAWDDSLTGVV

SEQ ID NO: 25622 - protein, 9 aa, Artificial Sequence
  Synthetic construct
QQYGSTPYT

SEQ ID NO: 25623 - protein, 11 aa, Artificial Sequence
  Synthetic construct
QQYDNWPPMYT

SEQ ID NO: 25624 - protein, 9 aa, Artificial Sequence
  Synthetic construct
QTWGTGIRV

SEQ ID NO: 25625 - protein, 10 aa, Artificial Sequence
  Synthetic construct
QNYGHSPTWT

SEQ ID NO: 25626 - protein, 9 aa, Artificial Sequence
  Synthetic construct
QQTYNIPRT

SEQ ID NO: 25627 - protein, 10 aa, Artificial Sequence
  Synthetic construct
QQYGSSPPYT

SEQ ID NO: 25628 - protein, 10 aa, Artificial Sequence
  Synthetic construct
QQLNSYRPIT

SEQ ID NO: 25629 - protein, 8 aa, Artificial Sequence
  Synthetic construct
MQALQKLT

SEQ ID NO: 25630 - protein, 9 aa, Artificial Sequence
  Synthetic construct
QQYNSYPWT

SEQ ID NO: 25631 - protein, 8 aa, Artificial Sequence
  Synthetic construct
QQLNSYPH

SEQ ID NO: 25632 - protein, 9 aa, Artificial Sequence
  Synthetic construct
LQYGNSPRT

SEQ ID NO: 25633 - protein, 9 aa, Artificial Sequence
  Synthetic construct
QAWDSRTRV

SEQ ID NO: 25634 - protein, 11 aa, Artificial Sequence
  Synthetic construct
AAWDDSLSGVV

SEQ ID NO: 25635 - protein, 10 aa, Artificial Sequence
  Synthetic construct
QAWDSSTEVV

SEQ ID NO: 25636 - protein, 13 aa, Artificial Sequence
  Synthetic construct
SAWDDSLSTPNVV

SEQ ID NO: 25637 - protein, 9 aa, Artificial Sequence
  Synthetic construct
QQLNSYPFT

SEQ ID NO: 25638 - protein, 10 aa, Artificial Sequence
  Synthetic construct
CSYARGSIFV

SEQ ID NO: 25639 - protein, 9 aa, Artificial Sequence
  Synthetic construct
QQSDITPWT

SEQ ID NO: 25640 - protein, 10 aa, Artificial Sequence
  Synthetic construct
QQAKNFPHFT

SEQ ID NO: 25641 - protein, 11 aa, Artificial Sequence
  Synthetic construct
GTWDSSLSAVV

SEQ ID NO: 25642 - protein, 9 aa, Artificial Sequence
  Synthetic construct
QQRSNWPLT

SEQ ID NO: 25643 - protein, 9 aa, Artificial Sequence
  Synthetic construct
QQLNSYPPT

SEQ ID NO: 25644 - protein, 9 aa, Artificial Sequence
  Synthetic construct
MQGTQWPPT

SEQ ID NO: 25645 - protein, 9 aa, Artificial Sequence
  Synthetic construct
LQYDSAPWT

SEQ ID NO: 25646 - protein, 10 aa, Artificial Sequence
  Synthetic construct
QQYGSSPPIT

SEQ ID NO: 25647 - protein, 12 aa, Artificial Sequence
  Synthetic construct
QSYDSSLSGYVV

SEQ ID NO: 25648 - protein, 11 aa, Artificial Sequence
  Synthetic construct
HIWDNRSDQYA

SEQ ID NO: 25649 - protein, 10 aa, Artificial Sequence
  Synthetic construct
QQYNNWPGYT

SEQ ID NO: 25650 - protein, 8 aa, Artificial Sequence
  Synthetic construct
QQYNSYWT

SEQ ID NO: 25651 - protein, 11 aa, Artificial Sequence
  Synthetic construct
QQRSNWPPRYT

SEQ ID NO: 25652 - protein, 9 aa, Artificial Sequence
  Synthetic construct
MEGIHLPWT

SEQ ID NO: 25653 - protein, 11 aa, Artificial Sequence
  Synthetic construct
QHYYSWPLGGS

SEQ ID NO: 25654 - protein, 11 aa, Artificial Sequence
  Synthetic construct
GSFTISSTNYV

SEQ ID NO: 25655 - protein, 10 aa, Artificial Sequence
  Synthetic construct
VLYLGTGSVL

SEQ ID NO: 25656 - protein, 9 aa, Artificial Sequence
  Synthetic construct
HQTASIPHT

SEQ ID NO: 25657 - protein, 9 aa, Artificial Sequence
  Synthetic construct
QQYYSYPLT

SEQ ID NO: 25658 - protein, 10 aa, Artificial Sequence
  Synthetic construct
SSYTSSSLYV

SEQ ID NO: 25659 - protein, 9 aa, Artificial Sequence
  Synthetic construct
QQYNSYRRT

SEQ ID NO: 25660 - protein, 9 aa, Artificial Sequence
  Synthetic construct
QQSYSTLFT

SEQ ID NO: 25661 - protein, 12 aa, Artificial Sequence
  Synthetic construct
FSRDSSGNHQAV

SEQ ID NO: 25662 - protein, 11 aa, Artificial Sequence
  Synthetic construct
HVWDSRSDHVV

SEQ ID NO: 25663 - protein, 9 aa, Artificial Sequence
  Synthetic construct
QQYGSSPYT

SEQ ID NO: 25664 - protein, 11 aa, Artificial Sequence
  Synthetic construct
AAWDDSLKGWV

SEQ ID NO: 25665 - protein, 11 aa, Artificial Sequence
  Synthetic construct
ATWDSSLPGEI

SEQ ID NO: 25666 - protein, 9 aa, Artificial Sequence
  Synthetic construct
LEATHPPYT

SEQ ID NO: 25667 - protein, 9 aa, Artificial Sequence
  Synthetic construct
QQSYSTPYT

SEQ ID NO: 25668 - protein, 11 aa, Artificial Sequence
  Synthetic construct
YSTDSSGNYWV

SEQ ID NO: 25669 - protein, 9 aa, Artificial Sequence
  Synthetic construct
QQLNIYPRT

SEQ ID NO: 25670 - protein, 11 aa, Artificial Sequence
  Synthetic construct
ATWDDSLSGAV

SEQ ID NO: 25671 - protein, 9 aa, Artificial Sequence
  Synthetic construct
MQALQTPLT

SEQ ID NO: 25672 - protein, 10 aa, Artificial Sequence
  Synthetic construct
QQYNSYSLYT

SEQ ID NO: 25673 - protein, 9 aa, Artificial Sequence
  Synthetic construct
QKYNSAPLT

SEQ ID NO: 25674 - protein, 11 aa, Artificial Sequence
  Synthetic construct
AVWDDSLNGPV

SEQ ID NO: 25675 - protein, 9 aa, Artificial Sequence
  Synthetic construct
QRSFSTPWT

SEQ ID NO: 25676 - protein, 9 aa, Artificial Sequence
  Synthetic construct
MQGVHWPLT

SEQ ID NO: 25677 - protein, 9 aa, Artificial Sequence
  Synthetic construct
QQSYSTPLT

SEQ ID NO: 25678 - protein, 10 aa, Artificial Sequence
  Synthetic construct
CSYAGASTVK

SEQ ID NO: 25679 - protein, 9 aa, Artificial Sequence
  Synthetic construct
QQYNNWPYT

SEQ ID NO: 25680 - protein, 12 aa, Artificial Sequence
  Synthetic construct
CSYRSASTSLWV

SEQ ID NO: 25681 - protein, 8 aa, Artificial Sequence
  Synthetic construct
MQALQTLT

SEQ ID NO: 25682 - protein, 9 aa, Artificial Sequence
  Synthetic construct
QQYNDWPPT

SEQ ID NO: 25683 - protein, 10 aa, Artificial Sequence
  Synthetic construct
SSYSRSSTLV

SEQ ID NO: 25684 - protein, 9 aa, Artificial Sequence
  Synthetic construct
QRSFSTPWT

SEQ ID NO: 25685 - protein, 9 aa, Artificial Sequence
  Synthetic construct
MQALQTSYT

SEQ ID NO: 25686 - protein, 9 aa, Artificial Sequence
  Synthetic construct
QHYGSSPLT

SEQ ID NO: 25687 - protein, 10 aa, Artificial Sequence
  Synthetic construct
QAWDSSTAVV

SEQ ID NO: 25688 - protein, 11 aa, Artificial Sequence
  Synthetic construct
ATWDNNLNAGV

SEQ ID NO: 25689 - protein, 9 aa, Artificial Sequence
  Synthetic construct
LQYYSYPFT

SEQ ID NO: 25690 - protein, 9 aa, Artificial Sequence
  Synthetic construct
MQALQTPLT

SEQ ID NO: 25691 - protein, 10 aa, Artificial Sequence
  Synthetic construct
YSAADNNLGI

SEQ ID NO: 25692 - protein, 10 aa, Artificial Sequence
  Synthetic construct
SSYTSSSTWV

SEQ ID NO: 25693 - protein, 11 aa, Artificial Sequence
  Synthetic construct
QSYDISLTGSI

SEQ ID NO: 25694 - protein, 8 aa, Artificial Sequence
  Synthetic construct
QQSYSTHT

SEQ ID NO: 25695 - protein, 11 aa, Artificial Sequence
  Synthetic construct
GTWDSSLSAVV

SEQ ID NO: 25696 - protein, 11 aa, Artificial Sequence
  Synthetic construct
AAWDDSLSGVV

SEQ ID NO: 25697 - protein, 11 aa, Artificial Sequence
  Synthetic construct
AAWDDSLSGPV

SEQ ID NO: 25698 - protein, 9 aa, Artificial Sequence
  Synthetic construct
QRSFSTPWT

SEQ ID NO: 25699 - protein, 11 aa, Artificial Sequence
  Synthetic construct
QQRSTRPLLFT

SEQ ID NO: 25700 - protein, 12 aa, Artificial Sequence
  Synthetic construct
CSYRGSSTLDVV

SEQ ID NO: 25701 - protein, 9 aa, Artificial Sequence
  Synthetic construct
QQSYSPPRT

SEQ ID NO: 25702 - protein, 9 aa, Artificial Sequence
  Synthetic construct
MQALQTPRT

SEQ ID NO: 25703 - protein, 12 aa, Artificial Sequence
  Synthetic construct
TAYPTRSTLEVV

SEQ ID NO: 25704 - protein, 9 aa, Artificial Sequence
  Synthetic construct
QQYDNHSLT

SEQ ID NO: 25705 - protein, 9 aa, Artificial Sequence
  Synthetic construct
QQRSNWPRT

SEQ ID NO: 25706 - protein, 8 aa, Artificial Sequence
  Synthetic construct
QQYNSYST

SEQ ID NO: 25707 - protein, 10 aa, Artificial Sequence
  Synthetic construct
ISFTSGSSWV

SEQ ID NO: 25708 - protein, 9 aa, Artificial Sequence
  Synthetic construct
QSWGASGAV

SEQ ID NO: 25709 - protein, 9 aa, Artificial Sequence
  Synthetic construct
QQYLRSGIT

SEQ ID NO: 25710 - protein, 12 aa, Artificial Sequence
  Synthetic construct
QVWDTSSDHRGV

SEQ ID NO: 25711 - protein, 10 aa, Artificial Sequence
  Synthetic construct
QQYGSSPGFT

SEQ ID NO: 25712 - protein, 9 aa, Artificial Sequence
  Synthetic construct
QQYYSTPLT

SEQ ID NO: 25713 - protein, 9 aa, Artificial Sequence
  Synthetic construct
QTWGTGIRV

SEQ ID NO: 25714 - protein, 12 aa, Artificial Sequence
  Synthetic construct
QSQDSSRSASVV

SEQ ID NO: 25715 - protein, 9 aa, Artificial Sequence
  Synthetic construct
QQYYSTPYT

SEQ ID NO: 25716 - protein, 8 aa, Artificial Sequence
  Synthetic construct
LQDYNYLT

SEQ ID NO: 25717 - protein, 9 aa, Artificial Sequence
  Synthetic construct
QQSSSTPYT

SEQ ID NO: 25718 - protein, 9 aa, Artificial Sequence
  Synthetic construct
QQSDGSLQT

SEQ ID NO: 25719 - protein, 11 aa, Artificial Sequence
  Synthetic construct
QSYDSSLSGYV

SEQ ID NO: 25720 - protein, 8 aa, Artificial Sequence
  Synthetic construct
QQYGTSPT

SEQ ID NO: 25721 - protein, 11 aa, Artificial Sequence
  Synthetic construct
GTWDSSLSAVV

SEQ ID NO: 25722 - protein, 12 aa, Artificial Sequence
  Synthetic construct
ATWDDSLNGLVV

SEQ ID NO: 25723 - protein, 9 aa, Artificial Sequence
  Synthetic construct
HQYNSFPYT

SEQ ID NO: 25724 - protein, 11 aa, Artificial Sequence
  Synthetic construct
NSRDSSGNHVV

SEQ ID NO: 25725 - protein, 10 aa, Artificial Sequence
  Synthetic construct
QQYDASSPPT

SEQ ID NO: 25726 - protein, 11 aa, Artificial Sequence
  Synthetic construct
QQYDASPPWYT

SEQ ID NO: 25727 - protein, 9 aa, Artificial Sequence
  Synthetic construct
MQALQTPFT

SEQ ID NO: 25728 - protein, 9 aa, Artificial Sequence
  Synthetic construct
QQYNSYSRT

SEQ ID NO: 25729 - protein, 9 aa, Artificial Sequence
  Synthetic construct
QQYYSTPQT

SEQ ID NO: 25730 - protein, 10 aa, Artificial Sequence
  Synthetic construct
CSYAGSSTLV

SEQ ID NO: 25731 - protein, 9 aa, Artificial Sequence
  Synthetic construct
QQYNNWPRT

SEQ ID NO: 25732 - protein, 10 aa, Artificial Sequence
  Synthetic construct
QQYNSYFAWT

SEQ ID NO: 25733 - protein, 12 aa, Artificial Sequence
  Synthetic construct
YSATTTDSQAPV

SEQ ID NO: 25734 - protein, 10 aa, Artificial Sequence
  Synthetic construct
QHFGTSPPLT

SEQ ID NO: 25735 - protein, 8 aa, Artificial Sequence
  Synthetic construct
QQYNNWRS

SEQ ID NO: 25736 - protein, 9 aa, Artificial Sequence
  Synthetic construct
QQYNTYPET

SEQ ID NO: 25737 - protein, 10 aa, Artificial Sequence
  Synthetic construct
QQYNSYSPYT

SEQ ID NO: 25738 - protein, 9 aa, Artificial Sequence
  Synthetic construct
QQSYSTPLT

SEQ ID NO: 25739 - protein, 8 aa, Artificial Sequence
  Synthetic construct
QQYYSTPV

SEQ ID NO: 25740 - protein, 9 aa, Artificial Sequence
  Synthetic construct
LQHNSYPYT

SEQ ID NO: 25741 - protein, 10 aa, Artificial Sequence
  Synthetic construct
QQYNNWPPYT

SEQ ID NO: 25742 - protein, 11 aa, Artificial Sequence
  Synthetic construct
GSYTTSTTTWV

SEQ ID NO: 25743 - protein, 9 aa, Artificial Sequence
  Synthetic construct
QQYNSFSRT

SEQ ID NO: 25744 - protein, 9 aa, Artificial Sequence
  Synthetic construct
QQYGSAPRT

SEQ ID NO: 25745 - protein, 11 aa, Artificial Sequence
  Synthetic construct
GTWDSSLSAVV

SEQ ID NO: 25746 - protein, 9 aa, Artificial Sequence
  Synthetic construct
QQSYSTPLT

SEQ ID NO: 25747 - protein, 9 aa, Artificial Sequence
  Synthetic construct
QKYNSAPLT

SEQ ID NO: 25748 - protein, 11 aa, Artificial Sequence
  Synthetic construct
QSYDSSLSGSV

SEQ ID NO: 25749 - protein, 7 aa, Artificial Sequence
  Synthetic construct
MQGSQFT

SEQ ID NO: 25750 - protein, 9 aa, Artificial Sequence
  Synthetic construct
MQGIHLPHT

SEQ ID NO: 25751 - protein, 9 aa, Artificial Sequence
  Synthetic construct
QHYGSSLYT

SEQ ID NO: 25752 - protein, 9 aa, Artificial Sequence
  Synthetic construct
QQYYSYPRT

SEQ ID NO: 25753 - protein, 9 aa, Artificial Sequence
  Synthetic construct
QQYNSYPLT

SEQ ID NO: 25754 - protein, 9 aa, Artificial Sequence
  Synthetic construct
QQSFRTPRT

SEQ ID NO: 25755 - protein, 10 aa, Artificial Sequence
  Synthetic construct
QQRINWPPVT

SEQ ID NO: 25756 - protein, 8 aa, Artificial Sequence
  Synthetic construct
QQGYSTPT

SEQ ID NO: 25757 - protein, 9 aa, Artificial Sequence
  Synthetic construct
QQYYSYPLT

SEQ ID NO: 25758 - protein, 8 aa, Artificial Sequence
  Synthetic construct
QQYDSSFT

SEQ ID NO: 25759 - protein, 11 aa, Artificial Sequence
  Synthetic construct
AAWDDSLNGAV

SEQ ID NO: 25760 - protein, 9 aa, Artificial Sequence
  Synthetic construct
QTWGTGIWV

SEQ ID NO: 25761 - protein, 8 aa, Artificial Sequence
  Synthetic construct
QQYAPIKM

SEQ ID NO: 25762 - protein, 9 aa, Artificial Sequence
  Synthetic construct
QQYYSYPWT

SEQ ID NO: 25763 - protein, 12 aa, Artificial Sequence
  Synthetic construct
QSRDIGDNPFVL

SEQ ID NO: 25764 - protein, 10 aa, Artificial Sequence [sequence omitted]

SEQ ID NO: 25765 - protein, 9 aa, Artificial Sequence
  Synthetic construct
QQYGNSPDT

SEQ ID NO: 25766 - protein, 11 aa, Artificial Sequence
  Synthetic construct
SSYTSSSTLYV

SEQ ID NO: 25767 - protein, 9 aa, Artificial Sequence
  Synthetic construct
QQSYITPWT

SEQ ID NO: 25768 - protein, 9 aa, Artificial Sequence
  Synthetic construct
QQYDSDSHT

SEQ ID NO: 25769 - protein, 9 aa, Artificial Sequence
  Synthetic construct
LQHKSYPLT

SEQ ID NO: 25770 - protein, 10 aa, Artificial Sequence
  Synthetic construct
ALYRGNGIWV

SEQ ID NO: 25771 - protein, 9 aa, Artificial Sequence
  Synthetic construct
QQYYSTPRT

SEQ ID NO: 25772 - protein, 10 aa, Artificial Sequence
  Synthetic construct
QQSYSNPRYT

SEQ ID NO: 25773 - protein, 11 aa, Artificial Sequence
  Synthetic construct
AAWDDSLNAYV

SEQ ID NO: 25774 - protein, 11 aa, Artificial Sequence
  Synthetic construct
ATWDDGLDGPV

SEQ ID NO: 25775 - protein, 9 aa, Artificial Sequence
  Synthetic construct
QKYNSAPWT

SEQ ID NO: 25776 - protein, 8 aa, Artificial Sequence
  Synthetic construct
MQGIHLRT

SEQ ID NO: 25777 - protein, 10 aa, Artificial Sequence
  Synthetic construct
NSYTTSTFMV

SEQ ID NO: 25778 - protein, 11 aa, Artificial Sequence
  Synthetic construct
GTWDSSLTTGM

SEQ ID NO: 25779 - protein, 9 aa, Artificial Sequence
  Synthetic construct
QRSFSTPWT

SEQ ID NO: 25780 - protein, 10 aa, Artificial Sequence
  Synthetic construct
MQALQTLLFT

SEQ ID NO: 25781 - protein, 9 aa, Artificial Sequence
  Synthetic construct
QQSYAFPIT

SEQ ID NO: 25782 - protein, 9 aa, Artificial Sequence
  Synthetic construct
YSATDYQGL

SEQ ID NO: 25783 - protein, 11 aa, Artificial Sequence
  Synthetic construct
QSSDSSGTSVV

SEQ ID NO: 25784 - protein, 9 aa, Artificial Sequence
  Synthetic construct
QTWGTGIWV

SEQ ID NO: 25785 - protein, 9 aa, Artificial Sequence
  Synthetic construct
QQSYSTLWT

SEQ ID NO: 25786 - protein, 12 aa, Artificial Sequence
  Synthetic construct
QSYDSSLSGSGV

SEQ ID NO: 25787 - protein, 11 aa, Artificial Sequence
  Synthetic construct
QVWDSTNDRVV

SEQ ID NO: 25788 - protein, 10 aa, Artificial Sequence
  Synthetic construct
SSYTSSSTLV

SEQ ID NO: 25789 - protein, 12 aa, Artificial Sequence
  Synthetic construct
QSADSSGTYPEV

SEQ ID NO: 25790 - protein, 9 aa, Artificial Sequence
  Synthetic construct
QQSYSTPRT

SEQ ID NO: 25791 - protein, 9 aa, Artificial Sequence
  Synthetic construct
QQLNSYPPT

SEQ ID NO: 25792 - protein, 11 aa, Artificial Sequence
  Synthetic construct
GTWDSSLSAVV

SEQ ID NO: 25793 - protein, 9 aa, Artificial Sequence
  Synthetic construct
QQSYSTPRT

SEQ ID NO: 25794 - protein, 11 aa, Artificial Sequence
  Synthetic construct
QSTDSSAIYEV

SEQ ID NO: 25795 - protein, 8 aa, Artificial Sequence
  Synthetic construct
QQYDGSPT

SEQ ID NO: 25796 - protein, 10 aa, Artificial Sequence
  Synthetic construct
CSYARGSIFV

SEQ ID NO: 25797 - protein, 9 aa, Artificial Sequence
  Synthetic construct
MIWDGRRVV

SEQ ID NO: 25798 - protein, 9 aa, Artificial Sequence
  Synthetic construct
QQSDSIPVT

SEQ ID NO: 25799 - protein, 8 aa, Artificial Sequence
  Synthetic construct
QQSYSTPT

SEQ ID NO: 25800 - protein, 10 aa, Artificial Sequence
  Synthetic construct
LSADSNANYV

SEQ ID NO: 25801 - protein, 10 aa, Artificial Sequence
  Synthetic construct
QQRSQWPPVT

SEQ ID NO: 25802 - protein, 10 aa, Artificial Sequence
  Synthetic construct
QQRINWPPVT

SEQ ID NO: 25803 - protein, 10 aa, Artificial Sequence
  Synthetic construct
SSYAGGNNLV

SEQ ID NO: 25804 - protein, 10 aa, Artificial Sequence
  Synthetic construct
MQALQTPPYT

SEQ ID NO: 25805 - protein, 12 aa, Artificial Sequence
  Synthetic construct
AVWDDNLRGPYV

SEQ ID NO: 25806 - protein, 9 aa, Artificial Sequence
  Synthetic construct
LQHKSYPLT

SEQ ID NO: 25807 - protein, 8 aa, Artificial Sequence
  Synthetic construct
MQALQSWT

SEQ ID NO: 25808 - protein, 11 aa, Artificial Sequence
  Synthetic construct
ATWDDGLNGWV

SEQ ID NO: 25809 - protein, 9 aa, Artificial Sequence
  Synthetic construct
MQALQTPHT

SEQ ID NO: 25810 - protein, 8 aa, Artificial Sequence
  Synthetic construct
QQYDGSPT

SEQ ID NO: 25811 - protein, 9 aa, Artificial Sequence
  Synthetic construct
QQYYSYPRT

SEQ ID NO: 25812 - protein, 8 aa, Artificial Sequence
  Synthetic construct
QQYNNWLT

SEQ ID NO: 25813 - protein, 9 aa, Artificial Sequence
  Synthetic construct
QQTYSIPRT

SEQ ID NO: 25814 - protein, 11 aa, Artificial Sequence
  Synthetic construct
SSYTSSSTRVV

SEQ ID NO: 25815 - protein, 13 aa, Artificial Sequence
  Synthetic construct
AAWNDNLNGPLVV

SEQ ID NO: 25816 - protein, 9 aa, Artificial Sequence
  Synthetic construct
QQYSVCPLT

SEQ ID NO: 25817 - protein, 9 aa, Artificial Sequence
  Synthetic construct
QQYGSSPIT

SEQ ID NO: 25818 - protein, 9 aa, Artificial Sequence
  Synthetic construct
QQYYSYPRT

SEQ ID NO: 25819 - protein, 9 aa, Artificial Sequence
  Synthetic construct
LQDNTYSYT

SEQ ID NO: 25820 - protein, 10 aa, Artificial Sequence
  Synthetic construct
QQYYSTPGLT

SEQ ID NO: 25821 - protein, 10 aa, Artificial Sequence
  Synthetic construct
QQYGSSRGLT

SEQ ID NO: 25822 - protein, 10 aa, Artificial Sequence
  Synthetic construct
QQYYSYGWLT

SEQ ID NO: 25823 - protein, 11 aa, Artificial Sequence
  Synthetic construct
SSRDISGNLVV

SEQ ID NO: 25824 - protein, 10 aa, Artificial Sequence
  Synthetic construct
CSYARGSIFV

SEQ ID NO: 25825 - protein, 10 aa, Artificial Sequence
  Synthetic construct
CSYARGSIFV

SEQ ID NO: 25826 - protein, 9 aa, Artificial Sequence
  Synthetic construct
QHLDSYPWP

SEQ ID NO: 25827 - protein, 11 aa, Artificial Sequence
  Synthetic construct
QQSYSTPPDRT

SEQ ID NO: 25828 - protein, 11 aa, Artificial Sequence
  Synthetic construct
SAWDDTLSGPV

SEQ ID NO: 25829 - protein, 10 aa, Artificial Sequence
  Synthetic construct
QQRSNWPPIT

SEQ ID NO: 25830 - protein, 11 aa, Artificial Sequence
  Synthetic construct
QSADSSGTYVV

SEQ ID NO: 25831 - protein, 9 aa, Artificial Sequence
  Synthetic construct
QQLDSYPWS

SEQ ID NO: 25832 - protein, 9 aa, Artificial Sequence
  Synthetic construct
QQYGSSPTT

SEQ ID NO: 25833 - protein, 8 aa, Artificial Sequence
  Synthetic construct
QQRSYYLT

SEQ ID NO: 25834 - protein, 10 aa, Artificial Sequence
  Synthetic construct
QQLNSYLPLT

SEQ ID NO: 25835 - protein, 11 aa, Artificial Sequence
  Synthetic construct
NSRDSSGKHWV

SEQ ID NO: 25836 - protein, 9 aa, Artificial Sequence
  Synthetic construct
QQRSRWPGT

SEQ ID NO: 25837 - protein, 9 aa, Artificial Sequence
  Synthetic construct
LQHNSYPYT

SEQ ID NO: 25838 - protein, 9 aa, Artificial Sequence
  Synthetic construct
QQYSGFSRT

SEQ ID NO: 25839 - protein, 11 aa, Artificial Sequence
  Synthetic construct
QSYDSSLSGSV

SEQ ID NO: 25840 - protein, 10 aa, Artificial Sequence
  Synthetic construct
SSYIGANSVV

SEQ ID NO: 25841 - protein, 11 aa, Artificial Sequence
  Synthetic construct
NCRDSSGNHLM

SEQ ID NO: 25842 - protein, 9 aa, Artificial Sequence
  Synthetic construct
QQRSNWPLT

SEQ ID NO: 25843 - protein, 9 aa, Artificial Sequence
  Synthetic construct
QQYNNWPRT

SEQ ID NO: 25844 - protein, 9 aa, Artificial Sequence
  Synthetic construct
QQYYSTPPT

SEQ ID NO: 25845 - protein, 9 aa, Artificial Sequence
  Synthetic construct
QQYSKWPRT

SEQ ID NO: 25846 - protein, 12 aa, Artificial Sequence
  Synthetic construct
ASWDDSLNGFYV

SEQ ID NO: 25847 - protein, 9 aa, Artificial Sequence
  Synthetic construct
MQGTHWPRT

SEQ ID NO: 25848 - protein, 9 aa, Artificial Sequence
  Synthetic construct
QQANSLPYT

SEQ ID NO: 25849 - protein, 9 aa, Artificial Sequence
  Synthetic construct
QQYDNWPPT

SEQ ID NO: 25850 - protein, 10 aa, Artificial Sequence
  Synthetic construct
CSYARGSIFV

SEQ ID NO: 25851 - protein, 11 aa, Artificial Sequence
  Synthetic construct
QSADSDTVSVL

SEQ ID NO: 25852 - protein, 11 aa, Artificial Sequence
  Synthetic construct
QQYNNFPLSIA

SEQ ID NO: 25853 - protein, 9 aa, Artificial Sequence
  Synthetic construct
QQYYLPPWT

SEQ ID NO: 25854 - protein, 9 aa, Artificial Sequence
  Synthetic construct
QQLNSYPLT

SEQ ID NO: 25855 - protein, 9 aa, Artificial Sequence
  Synthetic construct
QQYNSYSRT

SEQ ID NO: 25856 - protein, 9 aa, Artificial Sequence
  Synthetic construct
MQATHWPRT

SEQ ID NO: 25857 - protein, 9 aa, Artificial Sequence
  Synthetic construct
QQYGTSPRT

SEQ ID NO: 25858 - protein, 9 aa, Artificial Sequence
  Synthetic construct
HQYNNFTWT

SEQ ID NO: 25859 - protein, 9 aa, Artificial Sequence
  Synthetic construct
LLSYNDYRV

SEQ ID NO: 25860 - protein, 11 aa, Artificial Sequence
  Synthetic construct
QQYNNWPLVWT

SEQ ID NO: 25861 - protein, 9 aa, Artificial Sequence
  Synthetic construct
QAWDSNTVV

SEQ ID NO: 25862 - protein, 9 aa, Artificial Sequence
  Synthetic construct
QQYYSYPLT

SEQ ID NO: 25863 - protein, 11 aa, Artificial Sequence
  Synthetic construct
AAWDDTLNGVL

SEQ ID NO: 25864 - protein, 9 aa, Artificial Sequence
  Synthetic construct
QQSYTSPPA

SEQ ID NO: 25865 - protein, 9 aa, Artificial Sequence
  Synthetic construct
QQYGSSPYT

SEQ ID NO: 25866 - protein, 11 aa, Artificial Sequence
  Synthetic construct
QAFDSRLSSYV

SEQ ID NO: 25867 - protein, 9 aa, Artificial Sequence
  Synthetic construct
QQYNSYSPT

SEQ ID NO: 25868 - protein, 10 aa, Artificial Sequence
  Synthetic construct
MQALQTPKWT

SEQ ID NO: 25869 - protein, 9 aa, Artificial Sequence
  Synthetic construct
QQYGSSPFT

SEQ ID NO: 25870 - protein, 9 aa, Artificial Sequence
  Synthetic construct
QQYYSTPFT

SEQ ID NO: 25871 - protein, 11 aa, Artificial Sequence
  Synthetic construct
HSFDSSLSGSV

SEQ ID NO: 25872 - protein, 9 aa, Artificial Sequence
  Synthetic construct
MQALETPLA

SEQ ID NO: 25873 - protein, 11 aa, Artificial Sequence
  Synthetic construct
AAWDDSLSGWV

SEQ ID NO: 25874 - protein, 9 aa, Artificial Sequence
  Synthetic construct
QRSFSTPWT

SEQ ID NO: 25875 - protein, 9 aa, Artificial Sequence
  Synthetic construct
QQRSNWPPT

SEQ ID NO: 25876 - protein, 10 aa, Artificial Sequence
  Synthetic construct
QQYYSYPPWT

SEQ ID NO: 25877 - protein, 9 aa, Artificial Sequence
  Synthetic construct
QQLNSNPRT

SEQ ID NO: 25878 - protein, 9 aa, Artificial Sequence
  Synthetic construct
QQLHIYPPT

SEQ ID NO: 25879 - protein, 9 aa, Artificial Sequence
  Synthetic construct
QQSYIPPYT

SEQ ID NO: 25880 - protein, 8 aa, Artificial Sequence
  Synthetic construct
QRYGPSTT

SEQ ID NO: 25881 - protein, 9 aa, Artificial Sequence
  Synthetic construct
QQYYSYPWT

SEQ ID NO: 25882 - protein, 10 aa, Artificial Sequence
  Synthetic construct
QQRSNWPPWT

SEQ ID NO: 25883 - protein, 10 aa, Artificial Sequence
  Synthetic construct
QQYYSYPPWT

SEQ ID NO: 25884 - protein, 9 aa, Artificial Sequence
  Synthetic construct
QQYYSYPLT

SEQ ID NO: 25885 - protein, 9 aa, Artificial Sequence
  Synthetic construct
QQLDSYPWS

SEQ ID NO: 25886 - protein, 9 aa, Artificial Sequence
  Synthetic construct
QQRSNWPPT

SEQ ID NO: 25887 - protein, 9 aa, Artificial Sequence
  Synthetic construct
QQLNSYPPT

SEQ ID NO: 25888 - protein, 9 aa, Artificial Sequence
  Synthetic construct
QQYGNSPPT

SEQ ID NO: 25889 - protein, 8 aa, Artificial Sequence
  Synthetic construct
QKYNSALS

SEQ ID NO: 25890 - protein, 9 aa, Artificial Sequence
  Synthetic construct
QQYYSYPPT

SEQ ID NO: 25891 - protein, 10 aa, Artificial Sequence
  Synthetic construct
QQYNNWPPIT

SEQ ID NO: 25892 - protein, 9 aa, Artificial Sequence
  Synthetic construct
QQASSFPRT

SEQ ID NO: 25893 - protein, 10 aa, Artificial Sequence
  Synthetic construct
QQSYSTLSLT

SEQ ID NO: 25894 - protein, 11 aa, Artificial Sequence
  Synthetic construct
QVWDSSSDHKV

SEQ ID NO: 25895 - protein, 11 aa, Artificial Sequence
  Synthetic construct
QSYDRTLSGLV

SEQ ID NO: 25896 - protein, 10 aa, Artificial Sequence
  Synthetic construct
LSADSSATWV

SEQ ID NO: 25897 - protein, 9 aa, Artificial Sequence
  Synthetic construct
QQANSFPPT

SEQ ID NO: 25898 - protein, 9 aa, Artificial Sequence
  Synthetic construct
QQYYSYPLT

SEQ ID NO: 25899 - protein, 9 aa, Artificial Sequence
  Synthetic construct
QQYYSYPRA

SEQ ID NO: 25900 - protein, 8 aa, Artificial Sequence
  Synthetic construct
QQYSNFWT

SEQ ID NO: 25901 - protein, 10 aa, Artificial Sequence
  Synthetic construct
VLYMGSGIWV

SEQ ID NO: 25902 - protein, 10 aa, Artificial Sequence
  Synthetic construct
QQYDKSPQFT

SEQ ID NO: 25903 - protein, 9 aa, Artificial Sequence
  Synthetic construct
QAWDRTLYV

SEQ ID NO: 25904 - protein, 9 aa, Artificial Sequence
  Synthetic construct
LQANSLPYT

SEQ ID NO: 25905 - protein, 10 aa, Artificial Sequence
  Synthetic construct
CSYARGSIFV

SEQ ID NO: 25906 - protein, 9 aa, Artificial Sequence
  Synthetic construct
QQYGSLPRT

SEQ ID NO: 25907 - protein, 10 aa, Artificial Sequence
  Synthetic construct
QQYYSYPPYT

SEQ ID NO: 25908 - protein, 11 aa, Artificial Sequence
  Synthetic construct
ASWDDNLRGVL

SEQ ID NO: 25909 - protein, 10 aa, Artificial Sequence
  Synthetic construct
QQRTNWPPLT

SEQ ID NO: 25910 - protein, 11 aa, Artificial Sequence
  Synthetic construct
QSHDRSLGTTV

SEQ ID NO: 25911 - protein, 9 aa, Artificial Sequence
  Synthetic construct
QSYDSSNQV

SEQ ID NO: 25912 - protein, 10 aa, Artificial Sequence
  Synthetic construct
MQGTHWPPST

SEQ ID NO: 25913 - protein, 11 aa, Artificial Sequence
  Synthetic construct
AAWDDGLSGVV

SEQ ID NO: 25914 - protein, 10 aa, Artificial Sequence
  Synthetic construct
QQYGSSPPYT

SEQ ID NO: 25915 - protein, 12 aa, Artificial Sequence
  Synthetic construct
QSYDSGLTGGRV

SEQ ID NO: 25916 - protein, 10 aa, Artificial Sequence
  Synthetic construct
QQRSNWPPYT

SEQ ID NO: 25917 - protein, 9 aa, Artificial Sequence
  Synthetic construct
LQDYNYLFS

SEQ ID NO: 25918 - protein, 11 aa, Artificial Sequence
  Synthetic construct
QSADSSGTFYV

SEQ ID NO: 25919 - protein, 8 aa, Artificial Sequence
  Synthetic construct
QLSYSTLT

SEQ ID NO: 25920 - protein, 10 aa, Artificial Sequence [sequence omitted]

SEQ ID NO: 25921 - protein, 9 aa, Artificial Sequence
  Synthetic construct
QQYNNWPRT

SEQ ID NO: 25922 - protein, 9 aa, Artificial Sequence
  Synthetic construct
QQYNNWPQT

SEQ ID NO: 25923 - protein, 9 aa, Artificial Sequence
  Synthetic construct
QQYYSTPCT

SEQ ID NO: 25924 - protein, 8 aa, Artificial Sequence
  Synthetic construct
QQSYKGLT

SEQ ID NO: 25925 - protein, 9 aa, Artificial Sequence
  Synthetic construct
QQYVSSPRT

SEQ ID NO: 25926 - protein, 10 aa, Artificial Sequence
  Synthetic construct
CSYAGSRSVV

SEQ ID NO: 25927 - protein, 9 aa, Artificial Sequence
  Synthetic construct
QQSYSTPYI

SEQ ID NO: 25928 - protein, 10 aa, Artificial Sequence
  Synthetic construct
QTWGTDIRGV

SEQ ID NO: 25929 - protein, 9 aa, Artificial Sequence
  Synthetic construct
QQYHSNMYT

SEQ ID NO: 25930 - protein, 9 aa, Artificial Sequence
  Synthetic construct
MQALQTPLT

SEQ ID NO: 25931 - protein, 9 aa, Artificial Sequence
  Synthetic construct
QQSYNTPRT

SEQ ID NO: 25932 - protein, 9 aa, Artificial Sequence
  Synthetic construct
MIWHSSAAV

SEQ ID NO: 25933 - protein, 9 aa, Artificial Sequence
  Synthetic construct
QAWDSSTVV

SEQ ID NO: 25934 - protein, 9 aa, Artificial Sequence
  Synthetic construct
QQYDNLPYT

SEQ ID NO: 25935 - protein, 9 aa, Artificial Sequence
  Synthetic construct
QQYYSYPRT

SEQ ID NO: 25936 - protein, 9 aa, Artificial Sequence
  Synthetic construct
MQALQTPYT

SEQ ID NO: 25937 - protein, 9 aa, Artificial Sequence
  Synthetic construct
LLSYGTVYI

SEQ ID NO: 25938 - protein, 10 aa, Artificial Sequence [sequence omitted]

SEQ ID NO: 25939 - protein, 8 aa, Artificial Sequence
  Synthetic construct
MQGLDLRT

SEQ ID NO: 25940 - protein, 9 aa, Artificial Sequence
  Synthetic construct
QVWAGTVVV

SEQ ID NO: 25941 - protein, 8 aa, Artificial Sequence
  Synthetic construct
CSYARFVV

SEQ ID NO: 25942 - protein, 9 aa, Artificial Sequence
  Synthetic construct
QRSFSTPWT

SEQ ID NO: 25943 - protein, 11 aa, Artificial Sequence
  Synthetic construct
QSTYKTKTYQV

SEQ ID NO: 25944 - protein, 8 aa, Artificial Sequence
  Synthetic construct
QQYDNLWT

SEQ ID NO: 25945 - protein, 9 aa, Artificial Sequence
  Synthetic construct
QQYNSYSWT

SEQ ID NO: 25946 - protein, 9 aa, Artificial Sequence
  Synthetic construct
QQRSNWPPT

SEQ ID NO: 25947 - protein, 11 aa, Artificial Sequence
  Synthetic construct
QQYYSYPSALT

SEQ ID NO: 25948 - protein, 9 aa, Artificial Sequence
  Synthetic construct
QQYNSYSWT

SEQ ID NO: 25949 - protein, 9 aa, Artificial Sequence
  Synthetic construct
TQATQFPWT

SEQ ID NO: 25950 - protein, 9 aa, Artificial Sequence
  Synthetic construct
MQGIHLPYT

SEQ ID NO: 25951 - protein, 9 aa, Artificial Sequence
  Synthetic construct
QQYYNTPRT

SEQ ID NO: 25952 - protein, 10 aa, Artificial Sequence
  Synthetic construct
SSYAGSSTLL

SEQ ID NO: 25953 - protein, 9 aa, Artificial Sequence
  Synthetic construct
QQSYSTRYT

SEQ ID NO: 25954 - protein, 9 aa, Artificial Sequence
  Synthetic construct
MQGLQVPYT

SEQ ID NO: 25955 - protein, 8 aa, Artificial Sequence
  Synthetic construct
ASYTSSVV

SEQ ID NO: 25956 - protein, 9 aa, Artificial Sequence
  Synthetic construct
QTWTTGIAV

SEQ ID NO: 25957 - protein, 12 aa, Artificial Sequence
  Synthetic construct
QSADSSGTYPWV

SEQ ID NO: 25958 - protein, 9 aa, Artificial Sequence
  Synthetic construct
QQSYSTTWT

SEQ ID NO: 25959 - protein, 10 aa, Artificial Sequence
  Synthetic construct
QQYYSYPRYT

SEQ ID NO: 25960 - protein, 9 aa, Artificial Sequence
  Synthetic construct
QQYGDSPVT

SEQ ID NO: 25961 - protein, 10 aa, Artificial Sequence
  Synthetic construct
QQYGSSPLIT

SEQ ID NO: 25962 - protein, 8 aa, Artificial Sequence
  Synthetic construct
CSYARFVV

SEQ ID NO: 25963 - protein, 10 aa, Artificial Sequence
  Synthetic construct
SSYTTSSTLV

SEQ ID NO: 25964 - protein, 10 aa, Artificial Sequence
  Synthetic construct
APCTTSNTWV

SEQ ID NO: 25965 - protein, 9 aa, Artificial Sequence
  Synthetic construct
MQALQTPYT

SEQ ID NO: 25966 - protein, 10 aa, Artificial Sequence
  Synthetic construct
SSYTSSTTQV

SEQ ID NO: 25967 - protein, 9 aa, Artificial Sequence
  Synthetic construct
QQRSNWPLT

SEQ ID NO: 25968 - protein, 10 aa, Artificial Sequence
  Synthetic construct
CSYRGIGYLI

SEQ ID NO: 25969 - protein, 9 aa, Artificial Sequence
  Synthetic construct
MQALQTPRA

SEQ ID NO: 25970 - protein, 8 aa, Artificial Sequence
  Synthetic construct
QQYGTSPT

SEQ ID NO: 25971 - protein, 10 aa, Artificial Sequence
  Synthetic construct
YSTDSAAGDV

SEQ ID NO: 25972 - protein, 9 aa, Artificial Sequence
  Synthetic construct
QQSYLTPRT

SEQ ID NO: 25973 - protein, 9 aa, Artificial Sequence
  Synthetic construct
MQALQTFFT

SEQ ID NO: 25974 - protein, 8 aa, Artificial Sequence
  Synthetic construct
QQYNFWWT

SEQ ID NO: 25975 - protein, 9 aa, Artificial Sequence
  Synthetic construct
TQATQFPRT

SEQ ID NO: 25976 - protein, 9 aa, Artificial Sequence
  Synthetic construct
QQYNSYLFT

SEQ ID NO: 25977 - protein, 10 aa, Artificial Sequence
  Synthetic construct
GTWDGSLRGV

SEQ ID NO: 25978 - protein, 9 aa, Artificial Sequence
  Synthetic construct
QQYNSYQFT

SEQ ID NO: 25979 - protein, 8 aa, Artificial Sequence
  Synthetic construct
MQGINLYT

SEQ ID NO: 25980 - protein, 11 aa, Artificial Sequence
  Synthetic construct
QSYDSSLSGYV

SEQ ID NO: 25981 - protein, 9 aa, Artificial Sequence
  Synthetic construct
QVWDTSSWV

SEQ ID NO: 25982 - protein, 12 aa, Artificial Sequence
  Synthetic construct
SSRGTSGVRNWV

SEQ ID NO: 25983 - protein, 12 aa, Artificial Sequence
  Synthetic construct
ASRESGGDSLLL

SEQ ID NO: 25984 - protein, 10 aa, Artificial Sequence
  Synthetic construct
QQRINWPPVT

SEQ ID NO: 25985 - protein, 9 aa, Artificial Sequence
  Synthetic construct
MQALQTPRT

SEQ ID NO: 25986 - protein, 8 aa, Artificial Sequence
  Synthetic construct
QQYDSYST

SEQ ID NO: 25987 - protein, 10 aa, Artificial Sequence
  Synthetic construct
QSSDSNSLWV

SEQ ID NO: 25988 - protein, 9 aa, Artificial Sequence
  Synthetic construct
QQYYSYPRT

SEQ ID NO: 25989 - protein, 9 aa, Artificial Sequence
  Synthetic construct
QQYNSYSET

SEQ ID NO: 25990 - protein, 11 aa, Artificial Sequence
  Synthetic construct
QSYDRTLSGLV

SEQ ID NO: 25991 - protein, 11 aa, Artificial Sequence
  Synthetic construct
GTWDSSLSAGV

SEQ ID NO: 25992 - protein, 9 aa, Artificial Sequence
  Synthetic construct
LQANSLPYT

SEQ ID NO: 25993 - protein, 9 aa, Artificial Sequence
  Synthetic construct
QAWDSTTAV

SEQ ID NO: 25994 - protein, 10 aa, Artificial Sequence
  Synthetic construct
QQYYSTPPYT

SEQ ID NO: 25995 - protein, 9 aa, Artificial Sequence
  Synthetic construct
QQSYSTRWT

SEQ ID NO: 25996 - protein, 10 aa, Artificial Sequence
  Synthetic construct
QQYNNWPMYT

SEQ ID NO: 25997 - protein, 11 aa, Artificial Sequence
  Synthetic construct
SAWDSSLSAVV

SEQ ID NO: 25998 - protein, 9 aa, Artificial Sequence
  Synthetic construct
CSYAGSPVV

SEQ ID NO: 25999 - protein, 8 aa, Artificial Sequence
  Synthetic construct
QQANSFPT

SEQ ID NO: 26000 - protein, 9 aa, Artificial Sequence
  Synthetic construct
QQYNNWPRT

SEQ ID NO: 26001 - protein, 9 aa, Artificial Sequence
  Synthetic construct
QQYLSFPWT

SEQ ID NO: 26002 - protein, 8 aa, Artificial Sequence
  Synthetic construct
QQRSHWLT

SEQ ID NO: 26003 - protein, 9 aa, Artificial Sequence
  Synthetic construct
QQYYSTPLT

SEQ ID NO: 26004 - protein, 9 aa, Artificial Sequence
  Synthetic construct
MIWHSSAWV

SEQ ID NO: 26005 - protein, 9 aa, Artificial Sequence
  Synthetic construct
LQHNSYPYT

SEQ ID NO: 26006 - protein, 9 aa, Artificial Sequence
  Synthetic construct
QQYYSTPPT

SEQ ID NO: 26007 - protein, 8 aa, Artificial Sequence
  Synthetic construct
QQSYRKVS

SEQ ID NO: 26008 - protein, 9 aa, Artificial Sequence
  Synthetic construct
QQYGSSPLT

SEQ ID NO: 26009 - protein, 9 aa, Artificial Sequence
  Synthetic construct
QQYNSFMWT

SEQ ID NO: 26010 - protein, 11 aa, Artificial Sequence
  Synthetic construct
QQRSNWPPTYT

SEQ ID NO: 26011 - protein, 10 aa, Artificial Sequence
  Synthetic construct
SSYTSSSTYV

SEQ ID NO: 26012 - protein, 9 aa, Artificial Sequence
  Synthetic construct
QAWDSSTAV

SEQ ID NO: 26013 - protein, 10 aa, Artificial Sequence
  Synthetic construct
QQYGSSPGFT

SEQ ID NO: 26014 - protein, 11 aa, Artificial Sequence
  Synthetic construct
NSRDSVGNPVV

SEQ ID NO: 26015 - protein, 8 aa, Artificial Sequence
  Synthetic construct
QTWGTGIL

SEQ ID NO: 26016 - protein, 10 aa, Artificial Sequence
  Synthetic construct
MQALQTPPYT

SEQ ID NO: 26017 - protein, 9 aa, Artificial Sequence
  Synthetic construct
QSSDINNWV

SEQ ID NO: 26018 - protein, 11 aa, Artificial Sequence
  Synthetic construct
SAWDNNLEAYV

SEQ ID NO: 26019 - protein, 9 aa, Artificial Sequence
  Synthetic construct
QQLSSYPPT

SEQ ID NO: 26020 - protein, 9 aa, Artificial Sequence
  Synthetic construct
QQSYSTPQT

SEQ ID NO: 26021 - protein, 9 aa, Artificial Sequence
  Synthetic construct
QQYYSTPWT

SEQ ID NO: 26022 - protein, 9 aa, Artificial Sequence
  Synthetic construct
QQYGSSPWT

SEQ ID NO: 26023 - protein, 9 aa, Artificial Sequence
  Synthetic construct
LQHNSYPWT

SEQ ID NO: 26024 - protein, 11 aa, Artificial Sequence
  Synthetic construct
HSRDNSGNHLV

SEQ ID NO: 26025 - protein, 10 aa, Artificial Sequence
  Synthetic construct
QQSTTNPPFT

SEQ ID NO: 26026 - protein, 9 aa, Artificial Sequence
  Synthetic construct
QQYGSSPRT

SEQ ID NO: 26027 - protein, 10 aa, Artificial Sequence
  Synthetic construct
CSYARGSIFV

SEQ ID NO: 26028 - protein, 10 aa, Artificial Sequence
  Synthetic construct
QQYGSSPPIT

SEQ ID NO: 26029 - protein, 9 aa, Artificial Sequence
  Synthetic construct
QQYYSTPPT

SEQ ID NO: 26030 - protein, 8 aa, Artificial Sequence
  Synthetic construct
QQYDGSPT

SEQ ID NO: 26031 - protein, 9 aa, Artificial Sequence
  Synthetic construct
QQYGSSLWT

SEQ ID NO: 26032 - protein, 11 aa, Artificial Sequence
  Synthetic construct
ESWDSSLDAVV

SEQ ID NO: 26033 - protein, 10 aa, Artificial Sequence
  Synthetic construct
QLYGGSPPYP

SEQ ID NO: 26034 - protein, 11 aa, Artificial Sequence
  Synthetic construct
NSRDSSGNLVV

SEQ ID NO: 26035 - protein, 9 aa, Artificial Sequence
  Synthetic construct
QQYYLSPWT

SEQ ID NO: 26036 - protein, 9 aa, Artificial Sequence
  Synthetic construct
LQHNSYPLT

SEQ ID NO: 26037 - protein, 11 aa, Artificial Sequence
  Synthetic construct
NCRDSSGNHVV

SEQ ID NO: 26038 - protein, 10 aa, Artificial Sequence
  Synthetic construct
LLSYTDARPA

SEQ ID NO: 26039 - protein, 9 aa, Artificial Sequence
  Synthetic construct
QRSFSTPWT

SEQ ID NO: 26040 - protein, 9 aa, Artificial Sequence
  Synthetic construct
QQYNSYYYT

SEQ ID NO: 26041 - protein, 9 aa, Artificial Sequence
  Synthetic construct
LQDHTYPLT

SEQ ID NO: 26042 - protein, 11 aa, Artificial Sequence
  Synthetic construct
GTWDSSLSTVI

SEQ ID NO: 26043 - protein, 9 aa, Artificial Sequence
  Synthetic construct
QQANSFPLT

SEQ ID NO: 26044 - protein, 11 aa, Artificial Sequence
  Synthetic construct
QVWDGSSHRWV

SEQ ID NO: 26045 - protein, 9 aa, Artificial Sequence
  Synthetic construct
NSYTSSTTF

SEQ ID NO: 26046 - protein, 10 aa, Artificial Sequence
  Synthetic construct
QSYDSSIYVV

SEQ ID NO: 26047 - protein, 8 aa, Artificial Sequence
  Synthetic construct
QQYDGSPT

SEQ ID NO: 26048 - protein, 9 aa, Artificial Sequence
  Synthetic construct
MQALQTPRT

SEQ ID NO: 26049 - protein, 9 aa, Artificial Sequence
  Synthetic construct
LQHKSYPLT

SEQ ID NO: 26050 - protein, 9 aa, Artificial Sequence
  Synthetic construct
QQRSDWPLT

SEQ ID NO: 26051 - protein, 9 aa, Artificial Sequence
  Synthetic construct
QQYGTSSWT

SEQ ID NO: 26052 - protein, 11 aa, Artificial Sequence
  Synthetic construct
AAWDDSLNGVV

SEQ ID NO: 26053 - protein, 10 aa, Artificial Sequence
  Synthetic construct
GTWDSSLTAV

SEQ ID NO: 26054 - protein, 11 aa, Artificial Sequence
  Synthetic construct
SSWRDSLNGVV

SEQ ID NO: 26055 - protein, 9 aa, Artificial Sequence
  Synthetic construct
QQYYSTPLT

SEQ ID NO: 26056 - protein, 10 aa, Artificial Sequence
  Synthetic construct
QTWGTGTNYV

SEQ ID NO: 26057 - protein, 11 aa, Artificial Sequence
  Synthetic construct
QSYDRSLTAYV

SEQ ID NO: 26058 - protein, 9 aa, Artificial Sequence
  Synthetic construct
QQYYSYPFT

SEQ ID NO: 26059 - protein, 10 aa, Artificial Sequence
  Synthetic construct
QQFGTSPPLT

SEQ ID NO: 26060 - protein, 12 aa, Artificial Sequence
  Synthetic construct
SSRTSITTSGVL

SEQ ID NO: 26061 - protein, 9 aa, Artificial Sequence
  Synthetic construct
QQYNNWPQT

SEQ ID NO: 26062 - protein, 9 aa, Artificial Sequence
  Synthetic construct
QKYNRAPWT

SEQ ID NO: 26063 - protein, 12 aa, Artificial Sequence
  Synthetic construct
NSRDSSGNPYYV

SEQ ID NO: 26064 - protein, 9 aa, Artificial Sequence
  Synthetic construct
QQRSRWPGT

SEQ ID NO: 26065 - protein, 9 aa, Artificial Sequence
  Synthetic construct
MQALQTLLT

SEQ ID NO: 26066 - protein, 9 aa, Artificial Sequence
  Synthetic construct
QQLDSYPWS

SEQ ID NO: 26067 - protein, 9 aa, Artificial Sequence
  Synthetic construct
MQGIHLPWT

SEQ ID NO: 26068 - protein, 9 aa, Artificial Sequence
  Synthetic construct
QQVNVYPRT

SEQ ID NO: 26069 - protein, 9 aa, Artificial Sequence
  Synthetic construct
MQGTHWPPT

SEQ ID NO: 26070 - protein, 11 aa, Artificial Sequence
  Synthetic construct
AAWDDRVNAMI

SEQ ID NO: 26071 - protein, 10 aa, Artificial Sequence
  Synthetic construct
SSYAGSNNVV

SEQ ID NO: 26072 - protein, 9 aa, Artificial Sequence
  Synthetic construct
LQHENFPFT

SEQ ID NO: 26073 - protein, 9 aa, Artificial Sequence
  Synthetic construct
QQYGSSPNT

SEQ ID NO: 26074 - protein, 10 aa, Artificial Sequence
  Synthetic construct
CSLTSSGAWI

SEQ ID NO: 26075 - protein, 10 aa, Artificial Sequence
  Synthetic construct
QQYEKWPPWT

SEQ ID NO: 26076 - protein, 10 aa, Artificial Sequence
  Synthetic construct
CSYARGSIFV

SEQ ID NO: 26077 - protein, 8 aa, Artificial Sequence
  Synthetic construct
QQYNSYWT

SEQ ID NO: 26078 - protein, 9 aa, Artificial Sequence
  Synthetic construct
QQYNSYPYT

SEQ ID NO: 26079 - protein, 11 aa, Artificial Sequence
  Synthetic construct
GTWDSSLSSVV

SEQ ID NO: 26080 - protein, 9 aa, Artificial Sequence
  Synthetic construct
QQLNSYPPT

SEQ ID NO: 26081 - protein, 11 aa, Artificial Sequence
  Synthetic construct
QQYNNWPPMYT

SEQ ID NO: 26082 - protein, 9 aa, Artificial Sequence
  Synthetic construct
MQGTHWPWT

SEQ ID NO: 26083 - protein, 10 aa, Artificial Sequence
  Synthetic construct
SSYTSSSTWV

SEQ ID NO: 26084 - protein, 10 aa, Artificial Sequence
  Synthetic construct
QRYGSSPRVT

SEQ ID NO: 26085 - protein, 9 aa, Artificial Sequence
  Synthetic construct
LLVSGGSFV

SEQ ID NO: 26086 - protein, 10 aa, Artificial Sequence
  Synthetic construct
FLSYENERGV

SEQ ID NO: 26087 - protein, 9 aa, Artificial Sequence
  Synthetic construct
QQYYSYPRT

SEQ ID NO: 26088 - protein, 9 aa, Artificial Sequence
  Synthetic construct
QQYNSYPFT

SEQ ID NO: 26089 - protein, 9 aa, Artificial Sequence
  Synthetic construct
QQFSDLPWT

SEQ ID NO: 26090 - protein, 9 aa, Artificial Sequence
  Synthetic construct
MQSIHWPWT

SEQ ID NO: 26091 - protein, 9 aa, Artificial Sequence
  Synthetic construct
HQSSSLRDT

SEQ ID NO: 26092 - protein, 9 aa, Artificial Sequence
  Synthetic construct
TQATQFPHT

SEQ ID NO: 26093 - protein, 12 aa, Artificial Sequence
  Synthetic construct
AAWDDSLSGPVV

SEQ ID NO: 26094 - protein, 9 aa, Artificial Sequence
  Synthetic construct
QQTYNIPRT

SEQ ID NO: 26095 - protein, 11 aa, Artificial Sequence
  Synthetic construct
QSYDSSLSGWV

SEQ ID NO: 26096 - protein, 9 aa, Artificial Sequence
  Synthetic construct
QQFYSYPLT

SEQ ID NO: 26097 - protein, 8 aa, Artificial Sequence
  Synthetic construct
QQYNNWYT

SEQ ID NO: 26098 - protein, 9 aa, Artificial Sequence
  Synthetic construct
QRSFSTPWT

SEQ ID NO: 26099 - protein, 9 aa, Artificial Sequence
  Synthetic construct
LQDNTYSYT

SEQ ID NO: 26100 - protein, 10 aa, Artificial Sequence
  Synthetic construct
QQYGSSPPGT

SEQ ID NO: 26101 - protein, 10 aa, Artificial Sequence
  Synthetic construct
VLYMGSGIWV

SEQ ID NO: 26102 - protein, 11 aa, Artificial Sequence
  Synthetic construct
LLRTNWPLMYT

SEQ ID NO: 26103 - protein, 9 aa, Artificial Sequence
  Synthetic construct
QQSYTTPFT

SEQ ID NO: 26104 - protein, 9 aa, Artificial Sequence
  Synthetic construct
MQALQTPRT

SEQ ID NO: 26105 - protein, 8 aa, Artificial Sequence
  Synthetic construct
QQYNSYST

SEQ ID NO: 26106 - protein, 9 aa, Artificial Sequence
  Synthetic construct
QQRGSWPRT

SEQ ID NO: 26107 - protein, 9 aa, Artificial Sequence
  Synthetic construct
QQYGSSPRT

SEQ ID NO: 26108 - protein, 9 aa, Artificial Sequence
  Synthetic construct
QQYHVPPVT

SEQ ID NO: 26109 - protein, 11 aa, Artificial Sequence
  Synthetic construct
QQYGSSPPLYT

SEQ ID NO: 26110 - protein, 9 aa, Artificial Sequence
  Synthetic construct
MQALQTPWT

SEQ ID NO: 26111 - protein, 9 aa, Artificial Sequence
  Synthetic construct
QQLNSYPIT

SEQ ID NO: 26112 - protein, 10 aa, Artificial Sequence
  Synthetic construct
CSYAGSSTLV

SEQ ID NO: 26113 - protein, 9 aa, Artificial Sequence
  Synthetic construct
QQSYSTFYT

SEQ ID NO: 26114 - protein, 9 aa, Artificial Sequence
  Synthetic construct
QTYDSSTMI

SEQ ID NO: 26115 - protein, 9 aa, Artificial Sequence
  Synthetic construct
QQYNSYSRT

SEQ ID NO: 26116 - protein, 9 aa, Artificial Sequence
  Synthetic construct
QSWDTVGVL

SEQ ID NO: 26117 - protein, 9 aa, Artificial Sequence
  Synthetic construct
ETWDSNTRV

SEQ ID NO: 26118 - protein, 10 aa, Artificial Sequence
  Synthetic construct
SSYAGSSTLL

SEQ ID NO: 26119 - protein, 9 aa, Artificial Sequence
  Synthetic construct
QQYNSYPWT

SEQ ID NO: 26120 - protein, 9 aa, Artificial Sequence
  Synthetic construct
QQRNKWPLT

SEQ ID NO: 26121 - protein, 11 aa, Artificial Sequence
  Synthetic construct
QVWDGLREHFV

SEQ ID NO: 26122 - protein, 9 aa, Artificial Sequence
  Synthetic construct
QQCYSAPWT

SEQ ID NO: 26123 - protein, 8 aa, Artificial Sequence
  Synthetic construct
QQYDNLFT

SEQ ID NO: 26124 - protein, 10 aa, Artificial Sequence
  Synthetic construct
QQYNNWPPFT

SEQ ID NO: 26125 - protein, 10 aa, Artificial Sequence
  Synthetic construct
CSYARGSIFV

SEQ ID NO: 26126 - protein, 9 aa, Artificial Sequence
  Synthetic construct
QQYNSFALT

SEQ ID NO: 26127 - protein, 9 aa, Artificial Sequence
  Synthetic construct
QQYDNLPLT

SEQ ID NO: 26128 - protein, 8 aa, Artificial Sequence
  Synthetic construct
ASYTSSVV

SEQ ID NO: 26129 - protein, 9 aa, Artificial Sequence
  Synthetic construct
QRSFSTPWT

SEQ ID NO: 26130 - protein, 8 aa, Artificial Sequence
  Synthetic construct
QQYNNWRT

SEQ ID NO: 26131 - protein, 9 aa, Artificial Sequence
  Synthetic construct
QQSYSTPPT

SEQ ID NO: 26132 - protein, 10 aa, Artificial Sequence
  Synthetic construct
CSYAGSRSVV

SEQ ID NO: 26133 - protein, 12 aa, Artificial Sequence
  Synthetic construct
AAWDDSLSAHVV

SEQ ID NO: 26134 - protein, 9 aa, Artificial Sequence
  Synthetic construct
QQRSNWPIT

SEQ ID NO: 26135 - protein, 10 aa, Artificial Sequence [sequence omitted]

SEQ ID NO: 26136 - protein, 10 aa, Artificial Sequence
  Synthetic construct
QQYGSSPPLT

SEQ ID NO: 26137 - protein, 9 aa, Artificial Sequence
  Synthetic construct
QHYNGYPFA

SEQ ID NO: 26138 - protein, 9 aa, Artificial Sequence
  Synthetic construct
QQYNSYSYT

SEQ ID NO: 26139 - protein, 9 aa, Artificial Sequence
  Synthetic construct
QQLNIYPRT

SEQ ID NO: 26140 - protein, 10 aa, Artificial Sequence
  Synthetic construct
QQSYTTPPWT

SEQ ID NO: 26141 - protein, 9 aa, Artificial Sequence
  Synthetic construct
QQTYNIPRT

SEQ ID NO: 26142 - protein, 11 aa, Artificial Sequence
  Synthetic construct
QVWDSSSDRGV

SEQ ID NO: 26143 - protein, 17 aa, Artificial Sequence
  Synthetic construct
SSYIRKSVYTDSSMQVI

SEQ ID NO: 26144 - protein, 8 aa, Artificial Sequence
  Synthetic construct
QQYDGSPT

SEQ ID NO: 26145 - protein, 11 aa, Artificial Sequence
  Synthetic construct
QVWEGSSNRMV

SEQ ID NO: 26146 - protein, 9 aa, Artificial Sequence
  Synthetic construct
QAWDSSSVV

SEQ ID NO: 26147 - protein, 9 aa, Artificial Sequence
  Synthetic construct
QQLNGYPPT

SEQ ID NO: 26148 - protein, 9 aa, Artificial Sequence
  Synthetic construct
QQYNSYSET

SEQ ID NO: 26149 - protein, 9 aa, Artificial Sequence
  Synthetic construct
QSYDNNNVI

SEQ ID NO: 26150 - protein, 10 aa, Artificial Sequence
  Synthetic construct
QQYGSSPPYT

SEQ ID NO: 26151 - protein, 9 aa, Artificial Sequence
  Synthetic construct
QRSFSTPWT

SEQ ID NO: 26152 - protein, 11 aa, Artificial Sequence
  Synthetic construct
GTWDSSLSAGV

SEQ ID NO: 26153 - protein, 9 aa, Artificial Sequence
  Synthetic construct
QQYYSTPWT

SEQ ID NO: 26154 - protein, 12 aa, Artificial Sequence
  Synthetic construct
AAWDDSLSGSWV

SEQ ID NO: 26155 - protein, 10 aa, Artificial Sequence
  Synthetic construct
SSYTSSSTWV

SEQ ID NO: 26156 - protein, 9 aa, Artificial Sequence
  Synthetic construct
QQANSLPYT

SEQ ID NO: 26157 - protein, 9 aa, Artificial Sequence
  Synthetic construct
TQATQFPIT

SEQ ID NO: 26158 - protein, 9 aa, Artificial Sequence
  Synthetic construct
QQGNSFPVT

SEQ ID NO: 26159 - protein, 9 aa, Artificial Sequence
  Synthetic construct
QQSYNGPQT

SEQ ID NO: 26160 - protein, 9 aa, Artificial Sequence
  Synthetic construct
LQDYNYPRT

SEQ ID NO: 26161 - protein, 9 aa, Artificial Sequence
  Synthetic construct
LQDNTYSYT

SEQ ID NO: 26162 - protein, 12 aa, Artificial Sequence
  Synthetic construct
TSYPNRNTLEVI

SEQ ID NO: 26163 - protein, 8 aa, Artificial Sequence
  Synthetic construct
QQYNNWWT

SEQ ID NO: 26164 - protein, 9 aa, Artificial Sequence
  Synthetic construct
QAWDKNTVL

SEQ ID NO: 26165 - protein, 9 aa, Artificial Sequence
  Synthetic construct
QQYNSYPWT

SEQ ID NO: 26166 - protein, 11 aa, Artificial Sequence
  Synthetic construct
NSRDSSGNLVV

SEQ ID NO: 26167 - protein, 9 aa, Artificial Sequence
  Synthetic construct
QQYGISPYT

SEQ ID NO: 26168 - protein, 8 aa, Artificial Sequence
  Synthetic construct
LQYDTYPT

SEQ ID NO: 26169 - protein, 9 aa, Artificial Sequence
  Synthetic construct
QAWDRSAAV

SEQ ID NO: 26170 - protein, 10 aa, Artificial Sequence
  Synthetic construct
QQYYSYPPST

SEQ ID NO: 26171 - protein, 10 aa, Artificial Sequence
  Synthetic construct
QQRTNWEGVT

SEQ ID NO: 26172 - protein, 10 aa, Artificial Sequence
  Synthetic construct
MQGTHWPPLT

SEQ ID NO: 26173 - protein, 9 aa, Artificial Sequence
  Synthetic construct
QQSYNTPRT

SEQ ID NO: 26174 - protein, 9 aa, Artificial Sequence
  Synthetic construct
MQGLHVPHT

SEQ ID NO: 26175 - protein, 9 aa, Artificial Sequence
  Synthetic construct
QQTYNIPRT

SEQ ID NO: 26176 - protein, 8 aa, Artificial Sequence
  Synthetic construct
QQYDNLYT

SEQ ID NO: 26177 - protein, 9 aa, Artificial Sequence
  Synthetic construct
QQYDNLPRT

SEQ ID NO: 26178 - protein, 9 aa, Artificial Sequence
  Synthetic construct
QQYGSSPRT

SEQ ID NO: 26179 - protein, 9 aa, Artificial Sequence
  Synthetic construct
YCAAGNEGI

SEQ ID NO: 26180 - protein, 9 aa, Artificial Sequence
  Synthetic construct
QQGNSFPVT

SEQ ID NO: 26181 - protein, 12 aa, Artificial Sequence
  Synthetic construct
CSYTTSSTLEVV

SEQ ID NO: 26182 - protein, 9 aa, Artificial Sequence
  Synthetic construct
QQRSNWPYT

SEQ ID NO: 26183 - protein, 8 aa, Artificial Sequence
  Synthetic construct
QQYNSLYT

SEQ ID NO: 26184 - protein, 9 aa, Artificial Sequence
  Synthetic construct
QQSYSTLLT

SEQ ID NO: 26185 - protein, 8 aa, Artificial Sequence
  Synthetic construct
QQYNSFSR

SEQ ID NO: 26186 - protein, 9 aa, Artificial Sequence
  Synthetic construct
QQYGSLPPT

SEQ ID NO: 26187 - protein, 11 aa, Artificial Sequence
  Synthetic construct
AASDDTLSVVV

SEQ ID NO: 26188 - protein, 9 aa, Artificial Sequence
  Synthetic construct
HQSSSLPYT

SEQ ID NO: 26189 - protein, 11 aa, Artificial Sequence
  Synthetic construct
AAWDDSLNVVV

SEQ ID NO: 26190 - protein, 10 aa, Artificial Sequence
  Synthetic construct
QQYDNLPPWT

SEQ ID NO: 26191 - protein, 11 aa, Artificial Sequence
  Synthetic construct
GTWDSSLSAGV

SEQ ID NO: 26192 - protein, 9 aa, Artificial Sequence
  Synthetic construct
QQLSSYPPT

SEQ ID NO: 26193 - protein, 9 aa, Artificial Sequence
  Synthetic construct
QQRSNWRYT

SEQ ID NO: 26194 - protein, 11 aa, Artificial Sequence
  Synthetic construct
QVWDSSSDHVV

SEQ ID NO: 26195 - protein, 11 aa, Artificial Sequence
  Synthetic construct
QSTDSSGSQWV

SEQ ID NO: 26196 - protein, 9 aa, Artificial Sequence
  Synthetic construct
QQYGSSPYT

SEQ ID NO: 26197 - protein, 9 aa, Artificial Sequence
  Synthetic construct
LQHRDYPYT

SEQ ID NO: 26198 - protein, 9 aa, Artificial Sequence
  Synthetic construct
HQFDSSPWT

SEQ ID NO: 26199 - protein, 9 aa, Artificial Sequence
  Synthetic construct
QQYNSYPWT

SEQ ID NO: 26200 - protein, 9 aa, Artificial Sequence
  Synthetic construct
QKYDSAPWT

SEQ ID NO: 26201 - protein, 11 aa, Artificial Sequence
  Synthetic construct
GTWDSSLSAVV

SEQ ID NO: 26202 - protein, 10 aa, Artificial Sequence
  Synthetic construct
QSYDSSNHWV

SEQ ID NO: 26203 - protein, 9 aa, Artificial Sequence
  Synthetic construct
QQANSFPLT

SEQ ID NO: 26204 - protein, 9 aa, Artificial Sequence
  Synthetic construct
HQYYDYSYT

SEQ ID NO: 26205 - protein, 10 aa, Artificial Sequence
  Synthetic construct
SSYTSISTVV

SEQ ID NO: 26206 - protein, 10 aa, Artificial Sequence
  Synthetic construct
QQYGSAIIYT

SEQ ID NO: 26207 - protein, 7 aa, Artificial Sequence
  Synthetic construct
QQSYSNT

SEQ ID NO: 26208 - protein, 9 aa, Artificial Sequence
  Synthetic construct
MQGTHWPYT

SEQ ID NO: 26209 - protein, 10 aa, Artificial Sequence
  Synthetic construct
CSYTGVVAWV

SEQ ID NO: 26210 - protein, 10 aa, Artificial Sequence
  Synthetic construct
CSYARGSIFV

SEQ ID NO: 26211 - protein, 9 aa, Artificial Sequence
  Synthetic construct
QQYYSTPWT

SEQ ID NO: 26212 - protein, 11 aa, Artificial Sequence
  Synthetic construct
QLRDSSSDHVV

SEQ ID NO: 26213 - protein, 9 aa, Artificial Sequence
  Synthetic construct
QQLNTYPRT

SEQ ID NO: 26214 - protein, 11 aa, Artificial Sequence
  Synthetic construct
QQYGSSPPVLT

SEQ ID NO: 26215 - protein, 9 aa, Artificial Sequence
  Synthetic construct
MQALQTPQT

SEQ ID NO: 26216 - protein, 10 aa, Artificial Sequence
  Synthetic construct
QHFDTSPQAT

SEQ ID NO: 26217 - protein, 9 aa, Artificial Sequence
  Synthetic construct
QQAYSFPLT

SEQ ID NO: 26218 - protein, 8 aa, Artificial Sequence
  Synthetic construct
QQYDGSPT

SEQ ID NO: 26219 - protein, 10 aa, Artificial Sequence
  Synthetic construct
QQYGSSPRGT

SEQ ID NO: 26220 - protein, 9 aa, Artificial Sequence
  Synthetic construct
QQSYSTPRT

SEQ ID NO: 26221 - protein, 9 aa, Artificial Sequence
  Synthetic construct
QQYKSYSYT

SEQ ID NO: 26222 - protein, 9 aa, Artificial Sequence
  Synthetic construct
QHYNERPLT

SEQ ID NO: 26223 - protein, 9 aa, Artificial Sequence
  Synthetic construct
QQYYSTPYT

SEQ ID NO: 26224 - protein, 9 aa, Artificial Sequence
  Synthetic construct
QQYYSFPPT

SEQ ID NO: 26225 - protein, 12 aa, Artificial Sequence
  Synthetic construct
AAWDDSLSGRWV

SEQ ID NO: 26226 - protein, 9 aa, Artificial Sequence
  Synthetic construct
QQYYSAPRT

SEQ ID NO: 26227 - protein, 9 aa, Artificial Sequence
  Synthetic construct
QQANSFPLT

SEQ ID NO: 26228 - protein, 9 aa, Artificial Sequence
  Synthetic construct
QKYNSAPFT

SEQ ID NO: 26229 - protein, 9 aa, Artificial Sequence
  Synthetic construct
QQYNNFPWT

SEQ ID NO: 26230 - protein, 10 aa, Artificial Sequence
  Synthetic construct
QSFDDNNLWV

SEQ ID NO: 26231 - protein, 10 aa, Artificial Sequence
  Synthetic construct
QQYGSSPGFT

SEQ ID NO: 26232 - protein, 9 aa, Artificial Sequence
  Synthetic construct
QQYYSTLLT

SEQ ID NO: 26233 - protein, 10 aa, Artificial Sequence
  Synthetic construct
QQYYITPPYT

SEQ ID NO: 26234 - protein, 9 aa, Artificial Sequence
  Synthetic construct
QTWGTGIRV

SEQ ID NO: 26235 - protein, 9 aa, Artificial Sequence
  Synthetic construct
QQYGSSPST

SEQ ID NO: 26236 - protein, 9 aa, Artificial Sequence
  Synthetic construct
MQALQTQIT

SEQ ID NO: 26237 - protein, 9 aa, Artificial Sequence
  Synthetic construct
QHYNGYPFT

SEQ ID NO: 26238 - protein, 10 aa, Artificial Sequence
  Synthetic construct
SSYTSISTVV

SEQ ID NO: 26239 - protein, 9 aa, Artificial Sequence
  Synthetic construct
QSYGSSTWV

SEQ ID NO: 26240 - protein, 9 aa, Artificial Sequence
  Synthetic construct
MQSIYWPWT

SEQ ID NO: 26241 - protein, 9 aa, Artificial Sequence
  Synthetic construct
MQGLQTPLT

SEQ ID NO: 26242 - protein, 11 aa, Artificial Sequence
  Synthetic construct
SSRDRSGDRYV

SEQ ID NO: 26243 - protein, 9 aa, Artificial Sequence
  Synthetic construct
QQYYSYPPT

SEQ ID NO: 26244 - protein, 9 aa, Artificial Sequence
  Synthetic construct
QQYFITPYT

SEQ ID NO: 26245 - protein, 9 aa, Artificial Sequence
  Synthetic construct
QQYGSSHIT

SEQ ID NO: 26246 - protein, 9 aa, Artificial Sequence
  Synthetic construct
QQYYHTPVT

SEQ ID NO: 26247 - protein, 9 aa, Artificial Sequence
  Synthetic construct
QSYDNSGGV

SEQ ID NO: 26248 - protein, 10 aa, Artificial Sequence
  Synthetic construct
QQRNKRPPYT

SEQ ID NO: 26249 - protein, 11 aa, Artificial Sequence
  Synthetic construct
AAWDDSLSGVV

SEQ ID NO: 26250 - protein, 9 aa, Artificial Sequence
  Synthetic construct
QQSSSTPYT

SEQ ID NO: 26251 - protein, 8 aa, Artificial Sequence
  Synthetic construct
QQYNNYYT

SEQ ID NO: 26252 - protein, 9 aa, Artificial Sequence
  Synthetic construct
LQHDNFPLS

SEQ ID NO: 26253 - protein, 9 aa, Artificial Sequence
  Synthetic construct
LQHYNYPAT

SEQ ID NO: 26254 - protein, 9 aa, Artificial Sequence
  Synthetic construct
QKYNSAPRT

SEQ ID NO: 26255 - protein, 11 aa, Artificial Sequence
  Synthetic construct
AAWDGSLGDVV

SEQ ID NO: 26256 - protein, 10 aa, Artificial Sequence
  Synthetic construct
FLSYGGTRGV

SEQ ID NO: 26257 - protein, 9 aa, Artificial Sequence
  Synthetic construct
QQYGNSSFT

SEQ ID NO: 26258 - protein, 9 aa, Artificial Sequence
  Synthetic construct
QQYGSSPQT

SEQ ID NO: 26259 - protein, 9 aa, Artificial Sequence
  Synthetic construct
MQALQTPGT

SEQ ID NO: 26260 - protein, 10 aa, Artificial Sequence
  Synthetic construct
QVYDYPPAWV

SEQ ID NO: 26261 - protein, 10 aa, Artificial Sequence
  Synthetic construct
CSYARGSIFV

SEQ ID NO: 26262 - protein, 10 aa, Artificial Sequence
  Synthetic construct
QQRKTWPPIT

SEQ ID NO: 26263 - protein, 12 aa, Artificial Sequence
  Synthetic construct
ISYRRSNTLEVV

SEQ ID NO: 26264 - protein, 9 aa, Artificial Sequence
  Synthetic construct
QQSYSSPRS

SEQ ID NO: 26265 - protein, 11 aa, Artificial Sequence
  Synthetic construct
QQYYSYPRGLT

SEQ ID NO: 26266 - protein, 10 aa, Artificial Sequence
  Synthetic construct
QQYGSSRMYT

SEQ ID NO: 26267 - protein, 10 aa, Artificial Sequence
  Synthetic construct
CSYAGSSTVV

SEQ ID NO: 26268 - protein, 9 aa, Artificial Sequence
  Synthetic construct
QKYNSAPFT

SEQ ID NO: 26269 - protein, 8 aa, Artificial Sequence
  Synthetic construct
QEYNTMWT

SEQ ID NO: 26270 - protein, 12 aa, Artificial Sequence
  Synthetic construct
NSRDSSGNPHVV

SEQ ID NO: 26271 - protein, 10 aa, Artificial Sequence
  Synthetic construct
QQYGSSPPYT

SEQ ID NO: 26272 - protein, 11 aa, Artificial Sequence
  Synthetic construct
GTWDSSLNVYV

SEQ ID NO: 26273 - protein, 9 aa, Artificial Sequence
  Synthetic construct
LQHDDFPYT

SEQ ID NO: 26274 - protein, 10 aa, Artificial Sequence
  Synthetic construct
CSYAGSSFVV

SEQ ID NO: 26275 - protein, 10 aa, Artificial Sequence
  Synthetic construct
QAWAPTTEVA

SEQ ID NO: 26276 - protein, 9 aa, Artificial Sequence
  Synthetic construct
QQSYSTPQT

SEQ ID NO: 26277 - protein, 11 aa, Artificial Sequence
  Synthetic construct
SSYTSSSTLGV

SEQ ID NO: 26278 - protein, 8 aa, Artificial Sequence
  Synthetic construct
QQYDGSPT

SEQ ID NO: 26279 - protein, 8 aa, Artificial Sequence
  Synthetic construct
QQRSNWYT

SEQ ID NO: 26280 - protein, 9 aa, Artificial Sequence
  Synthetic construct
QQSYSTPVT

SEQ ID NO: 26281 - protein, 9 aa, Artificial Sequence
  Synthetic construct
QQYDRYPYI

SEQ ID NO: 26282 - protein, 11 aa, Artificial Sequence
  Synthetic construct
AAWDDSLSGVI

SEQ ID NO: 26283 - protein, 9 aa, Artificial Sequence
  Synthetic construct
LQANSLPYT

SEQ ID NO: 26284 - protein, 9 aa, Artificial Sequence
  Synthetic construct
QQYYSYPWT

SEQ ID NO: 26285 - protein, 9 aa, Artificial Sequence
  Synthetic construct
QQSYSTPRT

SEQ ID NO: 26286 - protein, 8 aa, Artificial Sequence
  Synthetic construct
QAWDNVLV

SEQ ID NO: 26287 - protein, 9 aa, Artificial Sequence
  Synthetic construct
QQYGSSPRA

SEQ ID NO: 26288 - protein, 9 aa, Artificial Sequence
  Synthetic construct
QQLGSSPYT

SEQ ID NO: 26289 - protein, 12 aa, Artificial Sequence
  Synthetic construct
QSYDSSLSVFYV

SEQ ID NO: 26290 - protein, 9 aa, Artificial Sequence
  Synthetic construct
QQYYSTSLT

SEQ ID NO: 26291 - protein, 11 aa, Artificial Sequence
  Synthetic construct
QSHDSSLNIYV

SEQ ID NO: 26292 - protein, 10 aa, Artificial Sequence
  Synthetic construct
QQYGRSPLLI

SEQ ID NO: 26293 - protein, 9 aa, Artificial Sequence
  Synthetic construct
QQTYNIPRT

SEQ ID NO: 26294 - protein, 10 aa, Artificial Sequence
  Synthetic construct
VQTLQAPPYI

SEQ ID NO: 26295 - protein, 9 aa, Artificial Sequence
  Synthetic construct
QAWDSSTVI

SEQ ID NO: 26296 - protein, 9 aa, Artificial Sequence
  Synthetic construct
QKYNSAPLT

SEQ ID NO: 26297 - protein, 9 aa, Artificial Sequence
  Synthetic construct
QQLNTYPRT

SEQ ID NO: 26298 - protein, 9 aa, Artificial Sequence
  Synthetic construct
QQYYSYPLT

SEQ ID NO: 26299 - protein, 12 aa, Artificial Sequence
  Synthetic construct
QVWDSSSDPLYV

SEQ ID NO: 26300 - protein, 11 aa, Artificial Sequence
  Synthetic construct
AAWDDSLSGVI

SEQ ID NO: 26301 - protein, 10 aa, Artificial Sequence
  Synthetic construct
QQYGSSPPYT

SEQ ID NO: 26302 - protein, 9 aa, Artificial Sequence
  Synthetic construct
QQYGSPFFT

SEQ ID NO: 26303 - protein, 9 aa, Artificial Sequence
  Synthetic construct
QQRSNWPPT

SEQ ID NO: 26304 - protein, 10 aa, Artificial Sequence
  Synthetic construct
QQRSFWPRFS

SEQ ID NO: 26305 - protein, 9 aa, Artificial Sequence
  Synthetic construct
QVWDGSTAI

SEQ ID NO: 26306 - protein, 9 aa, Artificial Sequence
  Synthetic construct
HQYYATPYT

SEQ ID NO: 26307 - protein, 10 aa, Artificial Sequence
  Synthetic construct
QQFGSSPPLT

SEQ ID NO: 26308 - protein, 11 aa, Artificial Sequence
  Synthetic construct
SSYTSSSTLVV

SEQ ID NO: 26309 - protein, 10 aa, Artificial Sequence
  Synthetic construct
QAWAAGIHWV

SEQ ID NO: 26310 - protein, 10 aa, Artificial Sequence
  Synthetic construct
SSYTSSSTYV

SEQ ID NO: 26311 - protein, 9 aa, Artificial Sequence
  Synthetic construct
LQDYNYPLT

SEQ ID NO: 26312 - protein, 9 aa, Artificial Sequence
  Synthetic construct
QQSFSTFLT

SEQ ID NO: 26313 - protein, 9 aa, Artificial Sequence
  Synthetic construct
QQYGRSPYT

SEQ ID NO: 26314 - protein, 8 aa, Artificial Sequence
  Synthetic construct
QQYGSSQT

SEQ ID NO: 26315 - protein, 9 aa, Artificial Sequence
  Synthetic construct
QRSFSTPWT

SEQ ID NO: 26316 - protein, 9 aa, Artificial Sequence
  Synthetic construct
QQSYSTPFT

SEQ ID NO: 26317 - protein, 9 aa, Artificial Sequence
  Synthetic construct
QQRSDWPRT

SEQ ID NO: 26318 - protein, 9 aa, Artificial Sequence
  Synthetic construct
QQASSFPVT

SEQ ID NO: 26319 - protein, 9 aa, Artificial Sequence
  Synthetic construct
HQYGDSLYT

SEQ ID NO: 26320 - protein, 9 aa, Artificial Sequence
  Synthetic construct
QQANSLPYT

SEQ ID NO: 26321 - protein, 10 aa, Artificial Sequence
  Synthetic construct
QSYDRTNHVV

SEQ ID NO: 26322 - protein, 8 aa, Artificial Sequence
  Synthetic construct
QQYDNLWT

SEQ ID NO: 26323 - protein, 9 aa, Artificial Sequence
  Synthetic construct
MQALQTPLT

SEQ ID NO: 26324 - protein, 11 aa, Artificial Sequence
  Synthetic construct
LSPNSDSSYWV

SEQ ID NO: 26325 - protein, 9 aa, Artificial Sequence
  Synthetic construct
QQYYSYPRT

SEQ ID NO: 26326 - protein, 9 aa, Artificial Sequence
  Synthetic construct
QRSFSTPWT

SEQ ID NO: 26327 - protein, 8 aa, Artificial Sequence
  Synthetic construct
QQSYSTLT

SEQ ID NO: 26328 - protein, 9 aa, Artificial Sequence
  Synthetic construct
MQGSHWPPT

SEQ ID NO: 26329 - protein, 9 aa, Artificial Sequence
  Synthetic construct
QQSYSTPRT

SEQ ID NO: 26330 - protein, 8 aa, Artificial Sequence
  Synthetic construct
QQYNSYWT

SEQ ID NO: 26331 - protein, 9 aa, Artificial Sequence
  Synthetic construct
MQGINLPVT

SEQ ID NO: 26332 - protein, 11 aa, Artificial Sequence
  Synthetic construct
AAWDDSLNGPV

SEQ ID NO: 26333 - protein, 9 aa, Artificial Sequence
  Synthetic construct
QQSYSTPLT

SEQ ID NO: 26334 - protein, 8 aa, Artificial Sequence
  Synthetic construct
QTWGTGVQ

SEQ ID NO: 26335 - protein, 10 aa, Artificial Sequence
  Synthetic construct
SSYVRGGTVV

SEQ ID NO: 26336 - protein, 10 aa, Artificial Sequence
  Synthetic construct
SSFTNSSTLV

SEQ ID NO: 26337 - protein, 9 aa, Artificial Sequence
  Synthetic construct
QHYDKVPPT

SEQ ID NO: 26338 - protein, 11 aa, Artificial Sequence
  Synthetic construct
ATWDGSLSAWV

SEQ ID NO: 26339 - protein, 9 aa, Artificial Sequence
  Synthetic construct
QTWGTGIWV

SEQ ID NO: 26340 - protein, 10 aa, Artificial Sequence
  Synthetic construct
QQYHKSPPDT

SEQ ID NO: 26341 - protein, 9 aa, Artificial Sequence
  Synthetic construct
LQHNSYPWT

SEQ ID NO: 26342 - protein, 10 aa, Artificial Sequence [sequence omitted]

SEQ ID NO: 26343 - protein, 9 aa, Artificial Sequence
  Synthetic construct
QQSYSTPWT

SEQ ID NO: 26344 - protein, 11 aa, Artificial Sequence
  Synthetic construct
AAWDDSLNGLL

SEQ ID NO: 26345 - protein, 11 aa, Artificial Sequence
  Synthetic construct
QSTDPTETFVL

SEQ ID NO: 26346 - protein, 9 aa, Artificial Sequence
  Synthetic construct
QQYGSSPFT

SEQ ID NO: 26347 - protein, 9 aa, Artificial Sequence
  Synthetic construct
QTWGTGIRV

SEQ ID NO: 26348 - protein, 9 aa, Artificial Sequence
  Synthetic construct
QQSYSAPHT

SEQ ID NO: 26349 - protein, 9 aa, Artificial Sequence
  Synthetic construct
QQYNSYSYT

SEQ ID NO: 26350 - protein, 10 aa, Artificial Sequence
  Synthetic construct
SSYTSSSTFV

SEQ ID NO: 26351 - protein, 9 aa, Artificial Sequence
  Synthetic construct
QQYYSTLFT

SEQ ID NO: 26352 - protein, 9 aa, Artificial Sequence
  Synthetic construct
QQYGSSPYT

SEQ ID NO: 26353 - protein, 9 aa, Artificial Sequence
  Synthetic construct
QQANSFPWT

SEQ ID NO: 26354 - protein, 10 aa, Artificial Sequence
  Synthetic construct
SSYTLSTTVI

SEQ ID NO: 26355 - protein, 9 aa, Artificial Sequence
  Synthetic construct
QQSYNTPRT

SEQ ID NO: 26356 - protein, 12 aa, Artificial Sequence
  Synthetic construct
QSYDDSVGGSRV

SEQ ID NO: 26357 - protein, 10 aa, Artificial Sequence
  Synthetic construct
QTWGTGIHVV

SEQ ID NO: 26358 - protein, 9 aa, Artificial Sequence
  Synthetic construct
QQRVNWPLT

SEQ ID NO: 26359 - protein, 10 aa, Artificial Sequence
  Synthetic construct
CSYAGSSTYV

SEQ ID NO: 26360 - protein, 10 aa, Artificial Sequence
  Synthetic construct
NSYTTSATVL

SEQ ID NO: 26361 - protein, 9 aa, Artificial Sequence
  Synthetic construct
QQYYSTPFT

SEQ ID NO: 26362 - protein, 9 aa, Artificial Sequence
  Synthetic construct
QQRGSWPPA

SEQ ID NO: 26363 - protein, 8 aa, Artificial Sequence
  Synthetic construct
QESYSTNT

SEQ ID NO: 26364 - protein, 10 aa, Artificial Sequence
  Synthetic construct
SSYSRVTTCV

SEQ ID NO: 26365 - protein, 10 aa, Artificial Sequence
  Synthetic construct
SSYTSSSTVV

SEQ ID NO: 26366 - protein, 9 aa, Artificial Sequence
  Synthetic construct
QQYYSTPIT

SEQ ID NO: 26367 - protein, 8 aa, Artificial Sequence
  Synthetic construct
SSYTSRIV

SEQ ID NO: 26368 - protein, 9 aa, Artificial Sequence
  Synthetic construct
QQYNNWPLT

SEQ ID NO: 26369 - protein, 10 aa, Artificial Sequence
  Synthetic construct
QQYGSSPPYT

SEQ ID NO: 26370 - protein, 10 aa, Artificial Sequence
  Synthetic construct
QQYIGSKTYT

SEQ ID NO: 26371 - protein, 9 aa, Artificial Sequence
  Synthetic construct
MQSIQLPWT

SEQ ID NO: 26372 - protein, 9 aa, Artificial Sequence
  Synthetic construct
QQYGSSPYT

SEQ ID NO: 26373 - protein, 9 aa, Artificial Sequence
  Synthetic construct
QQLNIYPRT

SEQ ID NO: 26374 - protein, 9 aa, Artificial Sequence
  Synthetic construct
QQYNNWPRT

SEQ ID NO: 26375 - protein, 9 aa, Artificial Sequence
  Synthetic construct
QQYYSYQLT

SEQ ID NO: 26376 - protein, 8 aa, Artificial Sequence
  Synthetic construct
QQRSNPIT

SEQ ID NO: 26377 - protein, 8 aa, Artificial Sequence
  Synthetic construct
QQYYRGYT

SEQ ID NO: 26378 - protein, 10 aa, Artificial Sequence
  Synthetic construct
SSFTSSITVV

SEQ ID NO: 26379 - protein, 9 aa, Artificial Sequence
  Synthetic construct
QQRSRWPGT

SEQ ID NO: 26380 - protein, 11 aa, Artificial Sequence
  Synthetic construct
AAWDDSLNGQV

SEQ ID NO: 26381 - protein, 9 aa, Artificial Sequence
  Synthetic construct
QQYYNTPRT

SEQ ID NO: 26382 - protein, 10 aa, Artificial Sequence
  Synthetic construct
QQYGSSAKFT

SEQ ID NO: 26383 - protein, 8 aa, Artificial Sequence
  Synthetic construct
QQYNNWPA

SEQ ID NO: 26384 - protein, 8 aa, Artificial Sequence
  Synthetic construct
LQGIQLRT

SEQ ID NO: 26385 - protein, 9 aa, Artificial Sequence
  Synthetic construct
QTWGTGIRV

SEQ ID NO: 26386 - protein, 9 aa, Artificial Sequence
  Synthetic construct
QQYYNTPRT

SEQ ID NO: 26387 - protein, 9 aa, Artificial Sequence
  Synthetic construct
QQYGSSPNT

SEQ ID NO: 26388 - protein, 10 aa, Artificial Sequence
  Synthetic construct
QQYGSSPLYT

SEQ ID NO: 26389 - protein, 8 aa, Artificial Sequence
  Synthetic construct
MQGTHWPT

SEQ ID NO: 26390 - protein, 8 aa, Artificial Sequence
  Synthetic construct
QQSYGSGT

SEQ ID NO: 26391 - protein, 9 aa, Artificial Sequence
  Synthetic construct
QQINVYPRT

SEQ ID NO: 26392 - protein, 9 aa, Artificial Sequence
  Synthetic construct
QQYNNWPKT

SEQ ID NO: 26393 - protein, 10 aa, Artificial Sequence
  Synthetic construct
QQSYSTPPWT

SEQ ID NO: 26394 - protein, 12 aa, Artificial Sequence
  Synthetic construct
SSYTGTSTLEVL

SEQ ID NO: 26395 - protein, 10 aa, Artificial Sequence
  Synthetic construct
QQYNNWLRFT

SEQ ID NO: 26396 - protein, 9 aa, Artificial Sequence
  Synthetic construct
QQYGSSPLA

SEQ ID NO: 26397 - protein, 9 aa, Artificial Sequence
  Synthetic construct
QRSFSTPWT

SEQ ID NO: 26398 - protein, 13 aa, Artificial Sequence
  Synthetic construct
QSYDSSLNGRLYV

SEQ ID NO: 26399 - protein, 11 aa, Artificial Sequence
  Synthetic construct
TSRDSGGNHWV

SEQ ID NO: 26400 - protein, 12 aa, Artificial Sequence
  Synthetic construct
QQYNNWPPTSLT

SEQ ID NO: 26401 - protein, 9 aa, Artificial Sequence
  Synthetic construct
QQYYSYPWT

SEQ ID NO: 26402 - protein, 8 aa, Artificial Sequence
  Synthetic construct
QHYGSSLT

SEQ ID NO: 26403 - protein, 9 aa, Artificial Sequence
  Synthetic construct
QHYNSYPFT

SEQ ID NO: 26404 - protein, 9 aa, Artificial Sequence
  Synthetic construct
MQGTHWPIT

SEQ ID NO: 26405 - protein, 9 aa, Artificial Sequence
  Synthetic construct
QQYGSSPRT

SEQ ID NO: 26406 - protein, 9 aa, Artificial Sequence
  Synthetic construct
QQYYSYPQT

SEQ ID NO: 26407 - protein, 9 aa, Artificial Sequence
  Synthetic construct
QQVNIYPRT

SEQ ID NO: 26408 - protein, 9 aa, Artificial Sequence
  Synthetic construct
MQGTEWPRT

SEQ ID NO: 26409 - protein, 12 aa, Artificial Sequence
  Synthetic construct
AAWDDSLSGPYV

SEQ ID NO: 26410 - protein, 9 aa, Artificial Sequence
  Synthetic construct
QQYGSSPRT

SEQ ID NO: 26411 - protein, 10 aa, Artificial Sequence
  Synthetic construct
CSYARGSIFV

SEQ ID NO: 26412 - protein, 11 aa, Artificial Sequence
  Synthetic construct
QKYNSAPPWVT

SEQ ID NO: 26413 - protein, 9 aa, Artificial Sequence
  Synthetic construct
QQYNSYSPT

SEQ ID NO: 26414 - protein, 9 aa, Artificial Sequence
  Synthetic construct
LQDFNYPRI

SEQ ID NO: 26415 - protein, 9 aa, Artificial Sequence
  Synthetic construct
QQYGSSPWT

SEQ ID NO: 26416 - protein, 9 aa, Artificial Sequence
  Synthetic construct
QQSYLTPRT

SEQ ID NO: 26417 - protein, 11 aa, Artificial Sequence
  Synthetic construct
CSYAGSTTFAV

SEQ ID NO: 26418 - protein, 9 aa, Artificial Sequence
  Synthetic construct
QQYHAWPLT

SEQ ID NO: 26419 - protein, 9 aa, Artificial Sequence
  Synthetic construct
MQTTHWPWT

SEQ ID NO: 26420 - protein, 8 aa, Artificial Sequence
  Synthetic construct
QQYYSYPS

SEQ ID NO: 26421 - protein, 8 aa, Artificial Sequence
  Synthetic construct
QQYDGSPT

SEQ ID NO: 26422 - protein, 11 aa, Artificial Sequence
  Synthetic construct
QVWDGSSNRVV

SEQ ID NO: 26423 - protein, 9 aa, Artificial Sequence
  Synthetic construct
QQRDIWPRT

SEQ ID NO: 26424 - protein, 9 aa, Artificial Sequence
  Synthetic construct
QQYGSSPPG

SEQ ID NO: 26425 - protein, 8 aa, Artificial Sequence
  Synthetic construct
QQYNSFLT

SEQ ID NO: 26426 - protein, 9 aa, Artificial Sequence
  Synthetic construct
QQYNNWPPA

SEQ ID NO: 26427 - protein, 9 aa, Artificial Sequence
  Synthetic construct
QQANSFPLT

SEQ ID NO: 26428 - protein, 10 aa, Artificial Sequence
  Synthetic construct
QQFGTSPPLT

SEQ ID NO: 26429 - protein, 9 aa, Artificial Sequence
  Synthetic construct
QQYDDWPRT

SEQ ID NO: 26430 - protein, 9 aa, Artificial Sequence
  Synthetic construct
QQFYNYPLT

SEQ ID NO: 26431 - protein, 9 aa, Artificial Sequence
  Synthetic construct
QAWDSNTVV

SEQ ID NO: 26432 - protein, 10 aa, Artificial Sequence
  Synthetic construct
QETYSIPQWT

SEQ ID NO: 26433 - protein, 8 aa, Artificial Sequence
  Synthetic construct
QQYDNLFT

SEQ ID NO: 26434 - protein, 11 aa, Artificial Sequence
  Synthetic construct
AAWDDSLSGVI

SEQ ID NO: 26435 - protein, 9 aa, Artificial Sequence
  Synthetic construct
QQYDSWPLT

SEQ ID NO: 26436 - protein, 8 aa, Artificial Sequence
  Synthetic construct
QQYDNLWT

SEQ ID NO: 26437 - protein, 11 aa, Artificial Sequence
  Synthetic construct
AAWDDNLSGVL

SEQ ID NO: 26438 - protein, 9 aa, Artificial Sequence
  Synthetic construct
QQYGYSSLT

SEQ ID NO: 26439 - protein, 9 aa, Artificial Sequence
  Synthetic construct
QQYYTTPLT

SEQ ID NO: 26440 - protein, 11 aa, Artificial Sequence
  Synthetic construct
QQRSNWPPSLT

SEQ ID NO: 26441 - protein, 9 aa, Artificial Sequence
  Synthetic construct
QQANSFPLT

SEQ ID NO: 26442 - protein, 11 aa, Artificial Sequence
  Synthetic construct
QSYDTSLSGGV

SEQ ID NO: 26443 - protein, 9 aa, Artificial Sequence
  Synthetic construct
QQYNSYSYT

SEQ ID NO: 26444 - protein, 9 aa, Artificial Sequence
  Synthetic construct
LQDYNYLFS

SEQ ID NO: 26445 - protein, 11 aa, Artificial Sequence
  Synthetic construct
GTWDGALSVGL

SEQ ID NO: 26446 - protein, 9 aa, Artificial Sequence
  Synthetic construct
QQTYSLLWT

SEQ ID NO: 26447 - DNA, 15 bp, Artificial Sequence
  Synthetic construct
gctcctttacacgta

SEQ ID NO: 26448 - DNA, 15 bp, Artificial Sequence
  Synthetic construct
tgaccttcctctcct

SEQ ID NO: 26449 - DNA, 15 bp, Artificial Sequence
  Synthetic construct
acaatttgtctgcga

SEQ ID NO: 26450 - DNA, 15 bp, Artificial Sequence
  Synthetic contruct
tcctttcctgatagg

SEQ ID NO: 26451 - DNA, 15 bp, Artificial Sequence
  Synthetic construct
caggtcccttatttc

SEQ ID NO: 26452 - DNA, 15 bp, Artificial Sequence
  Synthetic construct
taactcagggcctat

SEQ ID NO: 26453 - DNA, 15 bp, Artificial Sequence
  Synthetic construct
cagcccactgcaata

SEQ ID NO: 26454 - DNA, 15 bp, Artificial Sequence
  Synthetic construct
atcgtcgagagctag

SEQ ID NO: 26455 - DNA, 47 bp, Artificial Sequence
  Synthetic construct
  misc_feature (22)..(34): n is a, c, g, or t
ccttggcacccgagaattccannnnnnnnnnnnncccatataagaaa
